United States Patent Application Publication US 2026/0027161 A1 - sequence listing, part 2

SEQ ID NO: 5 - DNA, 2973522 bp, Intestinicoccus colisanans (residues 1-1,486,761 of 2,973,522)
  source 1..2973522: mol_type = genomic DNA
atgaccgcagaaacggagctgcccgcttacctgccttacccccgtttcctgctgaaaatggacatatcccacaccgccaagctgctgtatgtgctgctgttagaccgttccaccctttcgcagaagaacggctggcaggacagcgagggacggatatacattgtctaccccatagcagagatagcggaaatgctggataaaggctgcaccaccataaagggcgcactgaacgaactggacgctgccgggctgctggaacgcagacggacgggcttttctgccgccaaccgtctgtatgtgaaagtgccgcctattccagtggtacagttttccgaccaactgacggacggaaaaccgaccctcataagggcgggaaaccgaccaactgacagccggaaaactgaccttatgacggtcggaaaaccgtcccctaaccaaactaatataaacaacctaatagagagccaaacaaaaagagcgagtgaggggcagccccctgccgcttatggcagatataaaaatgtattcctttctgacgcagaacttttggaactggaacaggacttccccggcaagtgggagtattaccttgaccggctttcctgccatatcgcttccactgggaagcagtaccacagccatgcagccaccatttacaagtgggcgcaggaagacgctgccaaaggcaaggctgccccgaaacagggcatacccgattattcatgcaaggagggcgagagcttatgaaaaacgagattgaagctatgattacggacattacagccactaccgccgaagcggaggactacacaggcgaggacgggcttttatactgcggcaagtgccatacgcccaaagaagcctactttgcagagggaaagacctgtttcgggcgtgaccgccacccaacagactgcgactgccagcgagcagcccgtgaaaagcagcaagccgccgaaagccgacagaagcaccttgaaaaagtggaggacttgaaacgccggggctttaccgaccctgctatgcggaactggacatttgagcatgacaacggcagaaacccacagaccgaaaccgcccgcttttatgtggagagctgggaaaccatgcaggctgaaaatatcggctacctgttttggggcggcgtggggacaggaaaaagctaccttgccgcctgtatcgccaacgcccttatggagaaagaggttgccgtctgtatgacaaactttgcaaccatactcaatgaccttgctgccagctttgatggcaggaacgaatatatttcccgcctttgcagctaccccctgctgatacttgatgattttggtatggagcgaggaacagaatacgggctggaacaggtttacagcgtgattgacagccgttaccgaagcgacaagccgctgatcgccacgaccaacctcacgctggaggaattgcagcacccgcaggacacgccccacgcccgtatctatgacaggctgacttccatgtgcgcccccgtccgcttcacgggcagcaacttccgaaaggaaaccgcacaggaaaaactggaacgcttaaagcaactgatgaagcagcgaaaggagagcctatgacagaaacgaaacagacaagcaccaccaaaacagaccgccgcccggactgtgtaacggaaatccgcatgggcaattccgtccttaccgtttccggcttcttcaagcagggcgcaaccgataccgcagccgacaagatgatgaaagtgctggaagcggaggctgctgccggacatacgccaccgttcagcgcataagtgatgacatggaaaagcggtcacgccggggagcatgaccgctggaatatcagtaacaactttattttttccgaagtttcaactcaatgccttttggagcagctatatcctgcaacagttttgcgataacagaagcctgttctttcttccccatactttgaaaatccttatcggatttaactgtttgcaagatattttcaatttctttaatcgttaagagattgactgcaacacagaatagattttttctgcgcccgtcattatagtgtgacaagaggaaatccaataatttgcgcttttcttcctgttcagcattataggcgggaatccctatctggctggctttttccatgtcattcatttgattatgatgagttataaaagaatcaaaatcatctatatgagcgtatttgtcacaagggaagctggtacactgaaagcaatattcgattttcccatgttcaatactgcactttgcgattttacaactttgattatcaacgccgcaaccggaacaatgccctgccaaattcataggacataatttacaatttagaccacaaagagaaaggtactgattgttacggacaaaccctttcattgtcacacccccttgtattgattagctccattttaccataagaacaagagtttttctactatgcaatcccaatcatctgctacacaaaaaacggcgatttgaccgaccataaagaagcagatttgacgcttttgccgctatacagacagccgccccatgtggtacaatcaaggtacggaatagtggggctggctgtcggaaacggaggattttatgttaagacagaccacccagaaaatcactgccctttatccaagactatcccatgaggacgagctgcaaggcgagagcaattccatttccaaccagaagcgtattcttgaaacctatgcaaagcagaacggcttttccaatctgcgctggtacacggacgacggttattctggtgcgaactttcaaagacccggtttccaagccatgcttgcggacattgaagccggaaaagtcgggacagttatcgtaaaggatatgtcgaggttagggcgaaactacctgcaagtgggaatgtatacggaaatgattttcccacagaaaggtgtccgcttcatcgctatcaatgacggagtggacagcgcacagggcgacaatgattttgccccgctgcggaatatctttaacgaatggctggtgagagatacgagcaagaaaatcaaagcagtaaaacgctcaaaaggcatgagtggcaagcccatcacaagcaagcctgtgtatggttacctcatggacgaggacgaaaatttcattattgacgaggaagctgcacccgtagtcaagcagatatacaacctctgccttgccgggaatggtccgaccaagatagcccgtatgctcacagagcagcagatccccacgccggggacgctggaataccgcaggacgggcagcacccgccgctaccaccccggctatgaatgcaagtgggcgaccaataccgttgtgcatatccttgaaaaccgggaatacacaggctgtctggtaaatttcaagacagaaaagccctcttacaaagtcaagcacagcgtagaaaatcccccggagaagcaagtgattttcgagaaccaccacgagcctatcatagacacccagacatgggaacgggtgcaggaacttcgcaagcagcgcaaacgccccaaccgctatgatgaagtgggcttgttctccggcatactgttctgtgcggactgcggcagtgtcatgtatcagcagcgataccagacggacaagcgcaagcaggactgttatatctgcggcaactacaagaaacgcacccatgactgtacggcgcactttatccgcaccgacctcttgaccgctggcgtactctccaatctgcggaaagtgaccagctatgcggcaaagcatgaagcccggtttatgaagctcttgattgagcagaacgaggacgggggcaagcgcaggaacgccgccaagaaaaaggaactggaagccgccgagaaacgcatagccgagttatccgctatcttcaagcggctgtatgaggacagcgtgaccgggcgcatatcagacgagcgtttcacagagctgtcggcagactatgaagcagagcaacgggaactgaaagaaagagccgccgctatccaagcggagctttccaaagcacaggaagccaccgtgaacgcagaaaagtttatgaatgttgtccggcggcataccagctttgaagaacttacccctactctgctgcgggagtttgtagagaaaatcgttgtgcatgagtgcagctatgacgagaacaagacccgcagacaggacattgagatttattattcttttgttggcaaggtggacttgcccgaataaccgcctgacctatccgacacaatgcgcaagtgccggataggaacggcaaaattttttacacttctattacttctttatcacacattagtaaaaagccagggtatgaaacagttgatggctggcggcggtgtcgccctcatcggcatcacccttgtacctctgctctccggcctgttcggttgatcgtctggcggtgatcgcttatgggcggcatactcgacaaactcgatgaatggctccgagggctgctcatcgagggaatcacgggaaacctgtcgggcatgttcgatacggtcaataccaaagtaggcgagatcgccggtgaagtgggacagacgccgctggcatggaacagcggcgtcttttctatgatccgcaacctctctgaaacggtgatcgttccaatcgccggggttatcctgacattcgtaatgtgttatgagctgatccagcttgtgacagagaaaaacaatctgcacgatgtagatacctggatgttcttcaagtggattttcaagaccttctgcgcagttctcattgtgacgaacacatggaatattgtcatgggtatctttgatgtggggcaaagcgttgtgaacagcagcgcaggtgtcatcatcgggaatacctccattgatatcagcagcgttatcacggatatggaggcgcagcttgaagccctgggcacgggagaactgttcgggctgtggttccagtcccttttcgtggggcttaccatgaacgccctttccatctgtatcatgcttgtcatttacgaccgcatgatcgaggtgtatttgacaacttccattggaccgatcccgcttgccactatgacaaaccgggattggagccatacaggacagaactacttgaaatccctgtttgcattggcgttccaggcatttctaatcatggtgtgcgtggcgatactctgttttggtacagagtatcgccacggacggaaatatctcaggcgcgatatgggcctgcatgggctacacggtcctgctgtgcttcgccctgttcaagaccggcagcctctctaagagcctgttcggagcgcattaaggaggcttgataaattggcgtatgtaaccattccaaaggatttgacgaaagtaaaatccaaagtgctgtttgggcttaccaaacggcagcttatatgtttcggagcggcggcactcatcggagtaccgcttttctttttgctcagacgcacggccagcaacagcgccgccgcgttctgcatgattatcgtcatgctcccgttctttctactcgccatgtatgagcggcacggccaacccctggaggtagtagccggacaggtcatccgctgtatgttcctgcggacgaaagaacgaccttaccagacaaacaatttctacgcagccctggagcggcaggcccaggcggaaaaggaggtgaaagccattgttcagaaagcgaaagccagagccgcaggcacggcagacggcaaaaccagcggtaaagctgaccgccgcagaaaagcgtgagatcagccgtatcctggaaaccgccagaggcgacggcaaggtacattccgcacaggacaccttaccgttccgccagatgtacccggacggtctgtgcaagctggacgatcacacctggtcgaagtgtatcgagttcgaggatgtgaattatcagcttgcaaagcctgacgaccagacggcgatctttgaagccctctgcgatatgtataacgcccatgacgcttctatcgggatgcagctctcccttgtgagccgccgcatgaaccgggaggattttgtgaagcgtatcgagatcgcggcgcagggagatcacttcgaccatatccgtgagctttacacacaaatgctccgcaagcagcttgaacggggcaacaacggtcttatcaaaacaaagtatctgaccctcaccatcgaggcacgggacagcaaaaccgcacgggcacgattttcccggatcgtcatggacgccctcaaccatttcaaggtcatgggcgctctggcaaaagagcttggcggcaaggagtggctggaaatgctccacggcatcctgcacccggacggggaacggtttgcctttgaatggagctggcttgccccttccggcctgtcggtccaggattttatcgcaccttcttctttccgcttcggtgaagcaaggaagttcacgatggcggataaattctgtgctgtgtcctttctgcagatcaacgcaccggaaatggatgaccgtatgctcactgaactgctggatacggacagcgggctgcttgtcagcctccatatccgcagcatggatcagaacgaggcgatcaaaacggtcaagcggaagatcaccgacattgacagtatgaagatcgacgcacagaaaaaggcggtgcgggaaggtttcgatatggatatcatccccactgaccttgccacctacgcaggcgaggcaaagaatatcctccgtgacctgcaaagcagaaatgagcgaatgttcctgatgaccttcctggtggtaaattttgcagacagcaagcaaaagctggagaatgatcttctccgtgcggcaagcgtggcgcagaaatataactgttccctggtacggctggactttcagcaggaggacggcttcgtgtcggctctgcccctgggtgtcaaccgcattaagatacagcgtgggcttaccacttcggcggtggcggtgttcgttcccttcaccacacaggagattttccacggcggcgaagctctctactacgggctcaatgccacttccggcaacatgatccttgctgaccgcaaaaagctgaaaacacccaacggcatgatcttaggcacacccggcagcggtaagagcttttccgcaaagcgttccatcgtgggtgtgttcctgaacacaaaggacgatatcctgatctgcgacccggaggcggaatattttccgctggtgaaccgtctggaaggacaggtcatcaaaatctcacctaccagcacgcagtatgtgaaccctatggatatcaacctcaattacagcgaggatgataacccgctggcgctgaaatctgactttatcttgtcgttctgcgaactggcggcaggtggccggaacggtctggacccggtggaaaagacggtcattgaccgtgccgtgcggatcgtatatcgcccctatatcgcagacccccgcccggagaatatgccgctgttggaagatttgtatgacgagatcaagcggcagccggagccggaggcacagcggatcgcggcggcactggaactgtatgtgcatggcagcctgaatgtttttaaccaccgtaccaacgtggatatcaacaaccgcattgtctgcttcgatatcaaggagctgggaaagcagctcaaaagcctgggtatgctggtgatccaggaccaggtatggaaccgtgtttcccaaaaccgggatcagggtaaatccacctggtacttcgtggacgagttccaccttctgctgcggggcgaggttggttcctggagcgtggagatttggaaacgctttcgcaaatggggcggtatccccacgggaattacgcagaacatcaaggacctgctttcctccccagagatcgagaacatctttgaaaacagcgattttgtgtaccttctgaaccaggccagcggagacaggaaaatcctttgcgagcgcctgaatatctccaaccagcaggcggcacatatcagcaacgcaggccccggcgaggggctgatcttcttcggcaatgtgatcctgccttttgtggatgacttcccgaaggacaatgaactttacagcattatgacaacaaaacttggtgaaaccgggaaaggagaaaacgaacatgagtgatccccgctatttgcatacggaagaaaaacaggagggcgaaaccttctttgatgtgatgaaccggctgattgccagaagcaagacggtcacggcggatatggaggcggttcttacggagctggaaagtgagatcgaaccgttccgtgcaccgaagggtcatgaataaactgacccatgtgagcctgttttccggcattggcggtctggacctggcggcggaggctgctgggtttgaaaccgtctgccagtgtgagtgggcggattttccgcactccgtcctctccgcacgatggccggatgttcccaggttccgggatatcactactttcacgaaggaggcgttttttgaaaaaacaggacttgaaacagttaccgtcatctcaggcggctttccctgtcagcccttctccaccgccggaaaacggaagggctttgcggatgaacgctacctgtggccggaaatgtgccgcattattaccgagctgcggccccgttgggtgcttggggaaaatgttgctggcttcatcaatatggggctcgacaaaacgatctttgacctggcaaaagcgggatacgctgttctcccattcgtatttccggcttgcggcgtcggcgcatggcatgagcgccagcgaacttttatcgtcgcggctgatgtttcccacaccccttgcctccgacaacaacaccgccagggacgcggcaagcctggatgtgttcctggcggacaatgggatattccgcaagaggaaccgaaacggggcgatctggagcctcagcctgtcggcggcggtattctatctgaccccggtggcgtcggacggtttccgctcgaccttgaagccgtcggccttcgatccggcgaagaaggacgggaacctttcagcgcagatcatctcccaggaacggccggtgtccgaaacatcggcgctgaacccggattgggtggaatggctcatgggcttcccgaaaggatggacggacgtatcctctggaccgccgaaccggaaggaatcccccgcatgaccgagcgcatggatgaccgtgcactgcggctgaaaactttgggcaatgcggtctgcccgccccaggcctatcccattttccgctatatcgccatgattgagaatggcacctgcggcgacttttgcccctatggaaaggaaggtgactgcctatgagggaactgaaagcgaccgataagatcacgcagaaaatgacccgtgacggtgcggtatcggaaaaccttgccacgggagaggtggaacatatcagcagccgggaaccggaaacggagttgtccgcttcttcggaagaatctgctggcacggctgctgaccttgccctgcgtgcggcggagcaccatgagaagaaaaccgcacgaaaggcggaaaaggctgacacccaggcagtgcgggatggttctgccgcaaggcagcgcccgtcctcccgcctgcaatttaccgaggaagaacgtgccgatcccatacttggaaagtacatcgaccgttccgaccgtgcggcggacaaattggatgcggcaaaagcagccatccccacaaagaaagtccttcgcaccgagcgtatttttgacgagacagccggaaaaggcaaaacgcagcttcactttgaagaaatggagaaacgccccaacggacgcctgcggcacaatccgctttcccggccggtccatgagatcgtccacgccgcccatgcgaaggtgcatgaggtggaacaggaaaatgtgggtgttgaggccggacacaagggcgaggtgctgacggaacgcgggcttgcctacggaaaaggcaaagtccgtgccgccgtccaccatcaccgcacaaagccctggcgtgacgcggcgaaggcagagcaggcttcttttaaggcaaacgccgaatacctttatcaaaaggcactgcatgatgatcctgcattggcagcttctaacccggtatctcgttttctgcagaaacagcggatcaagcggaactatgcaaaagagctgcggcaggcagagaaaaccgcaaagaacacagcggccacggcgaaaagtgcggcgcagaaagcaaaggacgccttcaaggaaacattcctctacatcaagcaccatagccggacggtgctgctggtgatcggcattggcgcctgtgttgctctgctgtttggcggagtttcttcctgttccatgatggcgggctctggcgtgggtggtgtatttacttcctcttatctctccgaggatgcggatatgctggctgcggaggcggcctactgcgagttggagcaggaacttcaatatgagctggaccactatgagactctgcaccccggatatgacgaataccgttttgatctggacgagatcgagcatgacccttatgtgctgatctccattctcacggcgttccatgaaggggtgtttaccatcgacgaggttcaggaggaactgcaaatgctctttgaaaagcagtacatcctgacgcagaccgtggaggtggaggtacgctatcggacggagacacggacagacagcgaaggaaacgactatgacgtggaagtaccatacaactactatatttgcaatgtgaagctggaaaacttcgacctttcccatgtgccggtctacatcatggacgaagaaacgctttccctgtatgcggtctatatggcgacgctggggaaccgggaagatttgttcccaggctccggctatgtagacaagtacaccaaaccgccaaccacctatgatatcccgccttccgcactggaagatgaaacctttgcggcgctcattaccgaggcagagaagtacatcggatatccttatgtctggggcggcagcaatcccaacacttcttttgattgctccggcttcgtgtcctgggtgctgacgcaaagcggcgtctgcaatacgggcaggctgggagcccaaggactctacaatatttccaccccggtatcctctgccaacgcaagacccggcgacctgatctttttcgtcggtacttacgatacaccgggcgtttcccatgtgggtatctatgtgggcggtggaaaaatgctgcactgcggtgaccccatccaatatgcagatatcaacacaagctactggcaatcccacttttacgctttcgggcgaccgccctacaactaaaaaacgatatggaggtaatttgatttatggcaacgacacagaagatccgcaatgacattgcgaaaaccaaagaaaagatcgcggaacagcagaaacgccttcgcgcgctggaggcgcagcttgcggaggaagaaaatctggaaatcgtccgcatggtgaaagccgtgaagatggataacaaggaactgaccgccttcctgaaagcctatgccagcggtatgatctccctgccggaaggtatgctgcaggagggcaacaccgagaatgaggaaacggagggatacgaggatgaagcataactttatgacaaaaatggtatcggctcttttggcggtggtgctcagcactgccgctttttctgtcactgcctttgccagcggcggcgaggaaaccacggagcccgtggctgaacaggaaacggccggggatgtttctgatctgctttccgctttggcgggcagccaagttacggtattcgtcaccgaggatggtatccagttcagttccagtgaaaatgactccgggcagatcggtactgtcaccacgggtggcggcaatttgaatgtccgcacgggcgcgggaatggactacaccgccttcacccagcttcccaatggaacgaccgtgaaggtgattggcacggacggcgactggctgaaggtcatcctgccggagaaagtcggctatgtctattccggatacatgacggtaagtgacggcgaggctggctccggggaaggttctttctctctggatgcggaaacactggaaaatctgctggggatgctgggcggcggtctgaatggtggtgccgccctaacgccggatgggaacctgtcactgattgacgatattggcagcccgaccgccagcggcaagcagtttattacagcggaaacgaagaacggcaatgtgttctatctcattatcgaccgtgacgacgagggcgaggaaaccgtgcattttctgaaccaggtggatgaagccgacctcctggcgctcacggaggacggagaaaaggcggaaacacctattgtctgcacctgtacggagaagtgccaggccggagcagtcaataccgcttgcccggtctgcgtaaaaaaccttagtgaatgtattggcacagagcagaaagctgtggagcccgccgagccagacaatccggagcctgaaaagaaaggcaatgccggggcaatcctggcggtgctgctgatccttgcagccggaggtggtgcggcggtctatttcctggtactgaaaccgaagcagggaaagaaggttcccgctgttctggatgatttcgacctggaggatgaagaagaatacctgaccgaggacgaggaaacggaggaaaagaatgagtaaactgattattgcggaaaaaccgagtgtggcaaaatctatcgcgtcggccttgggtgcttcatccagggccgatggcttttatgagggcagtggccttctcgtatcctggtgcgtggggcacctggtatccccaatggatgcgggcggctatgacgagcgtttcaagaaatggcgttatgatgatcttcccattctgccggagccgttccgctatgtgctggcaccgggcaaggaggacgcatttgaaaatctacgcgccctgatggaccgacccgacgtggatactatcgtcaatgcctgtgacgccgggcgggaaggggagctgatcttccgtctggtgtatgaaatggccggctgccgcaagccggttcttcggctctggatttcctcgatggaggacagcgctatccgggagggcttttctgatctgcgtcccggtgccgattatgaagccctgtatcaatcagccctctgccgccagaaagcggattggctggtggggatcaatgccacgcgccttttctccgttctctatcaccgcaccttgaatgtgggccgtgtgcaaacacccacgctggcaatgctggcggagcgtgacgcaaagatcacgctgtttcacaaggaaaaatatcatctgctgcgcctgacgctggatggagccgaggcggtgtcggagaaattcaccgattcggcagcggcggaacaggcagcggtcatgtgcaagggtgcgaccgtcacctgtacctctgttacccgtgagcagaagaaagagcaaccgccgaaactctatgaccttaccaccttgcagcgtgaggcgaaccgcctgttcggatacacggcgaagcagactctcgactacgcacagagcctctacgaaaagaagctgctgacctatccccgcacggacagccggtatctgacttccgacatggcggaaacggcatcctgtgtgatccacctggcggcaaagctgccgccctttgatggttgcacaaacttcttcccgctggtggaggccatgatctccgacaaggaggtatctgaccatcacgccattatcccgaccatggagattgaaaaatcggatatcaaggctttgcctctgggcgagcgcaacttgtttctgttggtctgctgcaagctgctgtgtgcgtcggcaagtccgtatgagtatgaggcagtcaccgccacctttgactgcggcggccattccttcaccgcaaagggcaagcgcatccttgccgaaggctggcgagagatcgaccgcattttccgtgcctttctgaaagaaaagcctgcggatggggacggcggcacgctcccggacttcaccgaagggcagacttttgacggcgcgaaggtttccgttaccgagcatttcacccagccgccgaagccctacaccgaagataccctcctgtccgctatggaaaatgcgggtaaggacgatatccccgacgaggcggagcgaaagggacttggcacgcctgcaaccagggcggcaatcatcgaaaagctggtggcagccggatttgtggaacgcaagggcaagagcctgatccccacaaaagccggtatcaaccttgtcacggtcctgccggagccgctgacctctcccatgctgacggcggaatgggaacaaaaattgacggagatcgcaaagggcggcgctgacccggataccttcatggacggtatccgcacgatggtccaggagatcgtgtccacctattcctgcatttccgaggatggcaaaaagctgtttgccccggagaaggaagtgatcggcacctgcccccgctgcggccagccggtctatgagggcaagaagaactttgcgtgttcggatcggtcctgcggtttcgtcctctggaaaaacgaccgcttctggacgagccgcaagaaggaactgacaaagaagatggcagcggaccttttaaaaaagggacgtaccaatgtcaaggaaatgtggtctgaaaagaaacaggctgcttatgacgctgcggtgattctggatgacacgggcggcaagtacatcaattttaagctggaatttccgaaaagaaaggttggtgctgatggcagaaaataagactttggaacatttacccgaagtgagggcggcggtggctgccctctccccggaggatcgggaactgttggcggcggtgcaggtctcgcccttcaagctgacagcaccggaacagttcaaggagtttgctgacaacatcgactatttcgtatttgagccaaacatccacgacctgaacgatctgggctggcggtatctggcacagcacatggatacgccgttacccccggaacttctgaaagcaatcgaccctgttccttttggcaagtacgccatgcaggaggaacagggccattttacggaacacggatatatttctctctccggcgacgagtggaaccatgagcgccctgcggagccggagaaaaagccctccatccgggaacggctggaacagggcaagaaggaatgtgcggagaaaaacaaggcacagccacacaaggaaaaggctgcgccggaactgtaaggaggtgctgatatgccgtattacgatcacgacaaggattatccctttgccgcctttatcaccaatcttgggaagtacaatgagggcgagcttgtgggcgagtgggtgaagtttcccaccaccgccgaggaattgaaggaagtatttaagcgtatcgggatcggccagaaggatgacttcggccagccctatgaggaatggttcatcacggactatgactgctatgtggacggtctttacagcaagctgggtgaatatgagaatctggacgagctgaattatctggcgtcgaagctggatgaaatgagcgaaagcgaatacgcacagtttcaggccggtatggaaatgggcgaccattgcggcagcctgcaggagatcatcaacctcaccgagaatctggattgctatgaggtttaccccgatatccatgactatgacgatctgggccgctattacatcgaagaactggacgttatgcaggtgccagagcatttgcagaattacatcgactatgaggcctacggtcgggacgttgcgttggaggaaaacggcaccttcacggatcagggctatgtgcgtgatacgggtgacagtttccatgagtattacgacggtgagcgtggcagtatccccgacgagtaccgggtaatgacttttcaggacgatcttcccgaagaagaaaaatctgaatgggctatggatattgcctttgacatggacgagtttttccgtcagaacgatccgcagtatgcggcggagcacccggaggcacaggctgccaaggaggaactttacgaaaacctgatggcagggcgcatttccgctctggatgaaaagctggcggcgctggggcagacgcaggaggactatcttccttcggagatcgaaaaattcaaggatgccacgggctatgaggaatttcttgattttgatccggcggaggtcaaggccgctttggaggacccggagaagtcccatgcggatgaaatgctgtccgctgcggagaaggttgcctcggaaaagatgactgtgcttgtagtggaacctatgaaggaaccctatgtgaaggagatcgaccccgaccttcattccctgcaggcagaggttggcggtgatattggggcaacctatccctattctgacccggtggcgctggtctgcaatgatgaaggaaagctcatcgggcttgatctgaaccgtgggctgcgggatgaaaatggagaaatttatgatatcgtagcagggacttttttggtggttgggcttggtgaggaagattttgcctccctgtcccctgaactgattcagaaatacacggaacagttcaaaacgccagaacgatttatgcagatcaatggcaatatcgttgttcttcctgtcccagcagagaagcaagacctcacttttctgccagaccgttttgagaccggcgagcgtgtgcagacaccgaggggcagctttcaggtgacggccatgagccgggagcagatggaggcggccggttacggtgtccaccatatttccgatgatggaaagtatcttatcatgggaaacggcacacgggcctttgccgtggcagcggagcagccggaaaaggacaatcctctccgcacggcagaaatgacgctggaggatgactacggcatgatcgacggcgttatcaacaacggcagacgcggcgaggaactggagaaggcgcaggaacacgcggagcagacgaagccggagaagccttccatccgtgagcggttagaggacgccaaacgggagtgtgccgagcataagccaccggagggcaagaagcccggccgtgatgtgccggagcatgactgcctatgagccgaagcaagaaatggcggctggaatgggcgttcttcctgggtgacaacggcaggcggcagtataaccatatctgtaaaaaatgtgttcacggctgcaagcagagtttccgggcgtgtctggtcgcttgcccgcattacagttccaaacggtctaaaatctgtgaggataagggggcgaaaaacgcagaataattccctgtattcgtattttcaaagggagcctttatgatttttcatgtgtcggtctgcttgctggaacatggagaaaaaggcttgatttcaaacactttctgatacataaaacgggagtacagcttttcggtttgtccgattgactgtactcccgcttttttatttgttttcgtcattatcaggtttttccgtttccgctacactttctatcatgtcaacgactacggcattaagctgtgcggcgttctgcgatgtaatgactggtcgcccggtatccttttcaatatcctgtcgaacctgaccggcatagctgccgccacgacgggcaatcttctgactttcagaaaatccttccggctgatgtgcttttgacagttctgtggttgttgcctctgcaagcatattcagaacaatttccatcgtactcatattatcacggaggttttcctttttcagaccttttaatttcttatattgccgagtagtcatgccggaccatgctttcgtaatctcatcggtgagaatggcatactcttttccttgctgcacgccacgctcctgccattcagcggtaagctcgttacggacacggatggaaaggagccgctgatgaatccagtctgtatcatagccttttttctgataggtttccaatgcacggtcgattgcctgttccgggtcgatcgtttcttcaatgcgttcacgaccaacctgggcaagccagagtttgaacggttcagctttaggtgacggaattgactgaataatgcgtaaaagctgttcagccgttgccgctagcaccttacgctttttgcctgttgcgcccatcattgctacctggggacaatttgtccccaggtagcttgcaagctgttcgtcacgcttacgcatttttttgagatagtctgttggattggaactatctgtcaggacagcgataacatccacaacggagaaataccattcttcctgttcttcgtcccatgcggtgcgtatttttctatcttcaaaaagctggatggaattattttcgtccatgcgcttcaacctccttagagtatgtattttaattttaacatgaaagggtttctatttctataagagaagcaaatttcgccgtagtaggcgttgtgggaatgtgcgtaaactgccaggattgtgaggctgtgggaaagctgtttgcagacctgtgggaaaaggcttgtctttttccatcaggctgtgaatggcttttccatcggcacgagcggcagttttccatatttccatgacgcaagaaaatcatccaacgatcagccagtacaccgtcagcggcacataccacactgccacgatcagccgccatgtcagaacgaaaccaccgatcacaccgccgataataaagttcagtgcaaacagggcgatccctccacccagggagccgccgcccggcacgatccagaggcacatccgatggagtccaaacggcagcccacagagtatccagagccatacatagtcaagctctccgttcttcacgcaggcagatttgaagatacaatacaggatcagtgccatggtcacgggcaatacgcttttgaagaaaaatgctttgattgcttcgcttcttgtcatcggtaaaacctccttccgcagttccattatacaggatgccgggagctgcgcccagcgtctttcaaagaaatttattccagttcatgccgccgctgttgttcctggtcctttggaacggccagcagcgcatccacattctgcttgacggtatcgtattcctgtgtttcggttcttgcggttttgaactccgtaaggagccgttccttttctgcgttgagattagcaagctccgttttcatgctttcagttgtcggcagcggcacagcccccagccgtttcaattctctggcggccgcttcaaaaaggatgatttcgctctcatgcccccgcagaaacttttccttatcgccggatttacggtaacggtcgtagatcggtttcaactggcgataggtggtagcgtgcttcatcacaagggtaagttcggcacttctgctttctattcgcttgatctccgtatgagtggtatccctgcgctcagacacggcggccaacttgctttccagttctccatagctgcttatcccgtgttcggtcaggaaattcatggtcttggcggcttgtttcagattgttcaacttcgcccaatgggtgaagcctgcgctctgctgtgccttaatgttattctggatatcaatgagcaggctgatcttcccgttctgctgtttcagctggcgggaaggtctggagcgtccagcaatccgggcggcaagggcttcttcggtgtaatccacaccaagggttttcagacgggtgaaccgttcctgatccggtgctttggcggagatatacttgccgcgcttaatctcataaccttctctctgcaggcggcgaagcagttcttctaaatcggaacaggctggtaggagccggtcgatggccgcttttagcttcgccttatagctgatgccgttctgtgtggcctgatgttcaatatagctcttgcccttgtcctgtccgggaatgatgacggacaagccgtgttccttgcaaagccggtcggaggtgcggcggatatcgtgatagcttcgcttgttggaatgatagtgcttgtaatccacaaagctgaccgcattaaaaatcaggtggttatgaacatgatctttgtctatgtgggtggtaaggacaaactcatacttgccgcccaggatttcttttgcaagctccatgccgatttcatgggcctgctccggcgtgacttccccaggctgaaaggcttggatcagatggcggcccaggttcgttcccttgtcgatggcatggcgacgggtccaggaaaattcgatatccgcagtttcggcagtgcagccataggaggatacaagcagctttccgtccgtcttttccgggttgcagatatagtcaatggctgctttcagcgttgacttgataggatgtgtctttgtaactgccatatctcgtccagcctttctcgtatctcgtccatatcggcctgatacgcagggcctccggcattgatccgcttggcaatctgattgatgttccggccaatggcagcaagctctttggtgaacgccttgatatctgcggtgtccgtatagatgatatatccgtcaatcgccatcttgcggaggtaggcaccatatctgcgtgtgggtagctggctcattttctcgtctatgagccgtttttcgtcctccgtaacatagaatttcatttggatattccgctttcggtttgccatgcgccgcctccgttcttcataagggtttgggattatcccaacaagcaattttgaattttcgggtaagggacctgaaaatctcaaaattcgcaagcgggtactcgcttgctgtgcttgctactgtaaccctaccctcattctccctctactaatactacaatttgaaacggagattttggctattttcatctaaaaatctttaatagcatgggcgttcatcaaaatttgacacaggagaaattatcacatatacttaatggtaattagttataatgagccaaaaggaggcattggtggtgctgacctatgaaaaacaagcactctctggtacgattgaagtattattgcggtctgaattgccagacgaatttgaagggacaaagttatacggctctctcgaagaagatgaactacggcaggactgtaaaatttttcggctgtcaaatgaaacagggcatggacgcattacagtctatcaggttttttctggtattgagctttactataacgatatgcacatgggatattgcaatcaaaatcaagccacagctaaaaacatgatagagattaaccattgtctgataggacgttttgagtgtagctttggtgaaaatagttgctgctatatggcggaaggcgatttgtcgatcagctccatgatgaagaaaaagtcaaattcgtgttttccactgaaccactatcacggtatttctatcgtcatcaatctggatgaattgctgccggaaatacggcaaatcatggagctattgaatattgatttgcactacatacaaaaatatatttgcgaaggaaaccgttgctgcatcatgcgggccaatccgtctattgaacatattttttcggaactctatcatgtccgggaaaaaagaaaaccaggatacatgaaagtcaaaatgctggaactgcttctgttcttaagtgatctcaatacggcagaagaagttttacagacggattatttcaatcaaaatcaggtcgcattgattaaagcagtagcgtcctatattacggaggacttgacagcacatcatacgattgaacagctttcccagaaattcgagatttctacaacagcattgaaaaagtgctttcgaggcgtctatggaacctctgtctattcttatcttcgtacctatcggcttcaagtcgccaaaaaattgttgctggaaaccgagtcgtcagtaacggagattgcaagtaaaatcggatatgaaaatccgaataaattcacttctgccttcaaagaaacgtatggcagctctccaacggaattcagaaagagtgtccgtttggatagaagcgggtccgtatggagtggcgaagaaatctgagctgtattagaatatcctttgtcagataaaagcagaaagaccgcttgaagctggcctgttttttgaatagcgggttagacgttgctaactttctgcaagacaaaggaggatttccaaatggaaaatgaaaaatcgacaggtaacaagtacactgtcaaagacgcggcaatcatcggtatcttctgtgcggtcatgttcgttgtatttatggtctattcgatcctgaccggcgcttcactgttctattccatgatttttaacgccgctggtgcggcacttatcctcgcaccgttctatgtttatatgtgcatgaaagtcggcaagcatggccccgctcttgtctacaatatcatgtgggcgattatcgccggattgatgatggggccatttatgattccgtggtttttgggcggcggtatcatcgcagagctttccatgtgcggaaaggatgcctaccatgacattaagcgtgtgtctatttcgtgggtaatcacggcactggttcgcgctgcacatggtatgtcagaaatttggtttttcaaagacgcatttcttgccaccggcgtcagcgagcagcaggttcaggttcagacccagtattacaccgatccgaagtacgtccttttgagcctggctgtcaccgctatcctggccgtccttggctgcatgattagtaacaaactgattgtgaagcacttcagaaagagtggtgcgattaaataaactatgagcatgaaatttgattttcgaaccaaattgcttgtcatagttctcactatgtcgcttgtggcggtgctcacaagcgacattttgatatacacactttttggcgttttgagcgtgtatctgattattcagggctttggcaggcagacaataaaatatttgatcgtctgcggtatttttatcgtgttgaggttgctttcaggaggacagggcattaccattcttatgccggaaatgttcctgttcatggtgctgcgtattttgatgatggttatggctgcgcagcccgtgattggtatgccgccgggagaagttgtagcagtttttaagaaaatccacgcgcctaatggaattgccctgcccgtaaccttcatgctgcgtttcttccctactgtgcgcagtgaattttctgatgtgttttcctcccttcgactgcgaaagctgttgtcatggaaacaccctctggacgcaatggagtatattgttacgcctgttattttccgttcatccagaatagccgaagaacttgccgcttctgctgaaagcagggggatttccaatcctgggaaacatacctgccgcagaaaaatagaatttcaaaaaagagattggattatgtgcgtgattgctgtttgtgtaactgcattctattttgtgctggaaaggacggtagcataatggtaaatgataaagcaaggcgatccgttatccagtttaaagatgtatcttttgaatatccgggagccgaaacagatagtatccatcatatcagcctcgatgtaaaagagggcgagtttcttgttctgactggagggagcggctgcggaaagacaactttaacacgattggtaaacgggttaggcgaacaattttacgaagggacactgaaagggcgcatcacactgttgggacgcaacatatcggaatatcctctgtatgaaatcgggaaaaaagtaggttcaatctttcaagatccaaagagccagttttttgccagtattacagaggatgagatttcgtttgggtgtgaaaattatggcgttccgtatgaagaattggataggcgggtttcaagtgcaatcaagcgtattaacggagatatgctgcgagggaaagaaatttatccgatgtccagcggggaaaaacagaaaatagcggtggcatccgtcaatgctgttgatccggatatttatgtgtttgatgaaccttcggccaatttggatatgtattccgttgaggcgcttaaaaatttgatgggtggacttaaagcggaaggccacacaatcattgttgctgaacaccggctttattatcttactgaccttgcagaccgttttctctatatggaaaacgggagcataaaagaagaatggacggcgggagaactgcgctctattccagaagaaaaaagacgagccataggaatacgagcggcagatttgcaccatattgaagtagatatttcccctgtaaaagaaaaagatatgacgatggaggtaaaggatttggcgttttcctatcgcaaacatccggttttccatgatgtatcttttcaggcgtatgctggtgatctgattgcgattgtaggccataacggaataggaaaaactactttgtcgaatattctttgtggtatgcaaaaggaaaaagagggtcaggtcatatataacgggacaaaggtatctaaaggcaaacggaagaattttgcctactttgttatgcaaaatacagattgccagttgtttggggacagcgtagaagaagaactgctattaaacggaaaaggcagtccccaggagcaacgcgatgatctgctaaaactatatggcttgtttgaatggaaagaacggcatcccgctactctttccggcgggcagaaacaacgactcactctcgcagtatcggattggatagatacccccgttttgattttggatgagcctaccagcggtcttgatttcaaaaatatgatgagaatatcggagcatttgaaagctctggcgcaaaaaggaaagaccattttaatcattacccacgattatgaatttgccgctatgacttgcaatcgggttctgcatttcgttgatgaaggtcatgtagaaacatttccgttacaggaaaatttgtcccgcttatactcctgccttatgtgtcaatgaattatgtgtccgattggatagatacgctctgtatggagtggcagaaacaaccgaatgattttatgataatagacgggttataaaatgctaacccgtctattattgcgaaaggagacttgcttatggagaagcaaaaaaatggagaactgtccagaatgttcggatatgcagggaaattccatgttttgactgttttgggatgtgttctctccggaatcagtaccattttatctatgctgccttttgtttgcatttggctcgtcatccgcgatttaatccaggcttttgctgccggggatatatctcttgcaacggggagcgcccattatgcgtggatggcggttgtgtttgcagcggcaagcattttaatttattttatcgccctgaactgtactcatctggcggcgtttcgtacagccaccaatatgagaaaatctgcaattcatcatatcgtgacgctgccgttggggtatttcagccaaaatgcaagcggacggctcagaaacatcattgatgataatgcagggcttacagaaggatttctggcccatcagcttcccgatctgaccggagccgcagttatgccggttgccgttattattttgattttcctttttgactggcggctgggaatttgctgcctgatacctatgggaatcagtgtcatctttctcaaacagatgatgggtggagataatgcgcagtttatgggcaagtatatgactgcactggaaacaatgaataaagaagctgtggaatatattcgcggtattcctgttgtaaaagtatttcagcaaactatttattccttcaaaaactttcacgctgcaatagaagaatacgaaaaatttgcttccgggtatgccttaaaatgccgtattcctcttacgggatttacagtaacactgaacggcacatttgtttttcttattccagtcgccatgtttattttgtccggggtcagcggccaggcggcttatgaaaatgttgtgctggattttctgttttacagtttgtttactccggtctgtgcaactatgatgaaccgtatcatgtttgccagcgagcagcttatggcggctaaaagtgcagtcagccgggtggatgaaattttgcaggaaaagcccttgaaggagccggaacatcccctgatcccggcagatgcttcgattgtgttttcggatgtttccttcgcctatccaggggccaaagagaaggccttagaccatatcagctttgaggttccgacaggaaaaacagtggcgcttgttggtgcctccggcagcggtaaaagtacagcggcaagcctcattccccgattttatgatgttcagtcaggttccgttacgattggcggcgtgaatgtacgcaatattgagaagcaggaactgatgaaaagagttgctttcgtgtttcagaatacctgtctgttcaaggacaccttgatgaataatattaaggcggcccgcccggacgctaccagggaagaagtcttgagagcggctgatgaagcacaatgcaaagatattattgaccgcctcccggatgggcttgatacgctcgttggaacaggaggcacatatctctcaggaggtgaaaatcaaaggattgctcttgcaagggcaattttaaaagacgcccctattattgtactggatgaagccacagcatttgcagatgccgaaaatgaacatcagatacagctcgcttttgagcggctgacccaaaacaaaacggttatgatgattgcccaccggctctctacgatacaagacgcagaccttatcctggtgttcaaggaggggcagattgcagaaagaggtacgcatgaagaattggtagccttaaatggtatttattcttctatgtggaaggattaccagacctcgattgcctggaaggtcggaaaggaggatgagcagcatgattaaggcgttaaaaaagaagtatgcgttaagcgatcagggtgcaaaagacctgttaaaagggatcgtttattcggtgctggccaatatcagccttatgtttcctgttattcttctggctatcgtcctcaatcagcttcttgcgcctgttttgggagcgagtgcgccagagatcagtgccgccgtttacactgtgattggaattgtgattttagctgttgtttttatttttcattattgccagtacaccgcgacatatctcgggacgtatgatgaaagcgcaaggcggcgtatcgggcttgcggaaaaattgcgtacccttccgctgaccttcttccaccagcgtgatcttgctgacctgacaagcacaattatgggcgactgtgcaaactttgaacacgcattttctcatacggttccacaattctttggagcagttatctctacggggattgtttgtatcggcctgctgattttcaactggcaaatgggtttggctcttctttgggtagctccgatttcatttgcaatcgttattctgtcacggaaatggcaggaaaaactcagcaaaaagcacatgaacgcaagactggagcttgcagaaggcattcaggaatgtttggaaaccgtacaggatataaaggcttgcaatcaggaagaagattatcttcgcaaattggacgcaaagatggatgctgcggaaaaagcacagatttcatccgaaatgacaacggcaagtctgctgacaaccggccagatgtttttacggctcggtttggcaacggtgattgtagtaggtaatagtcttgtggtaagtggagatacctctctgtttacctatattctgtttttgattgctgcctcccgcctgtacgatccgctttccggggcgatgtcaaatatggcagagctgttttctgtacagcttcaggtgaaccgcttgaaagaaatagaggaatacccggaagaaaccggtgagaagaatatccatacaaacgggtacgatattacattcgatcatgtccagttttcttacgaaaagggcaaaccggtactgagggatgtttcgtttactgcaaaacagggacaggtcactgcattggttggcccgtccggcggcggcaaaagtacagtcgcaaaactggcagccaaattttatcctctggacggaggaagaatactgttgggcggaaccgatattgctccgctaaattcaaccatgttgatgaaaaacttctctatcgtttttcaagatgttgtgctgtttaataacaccatcatggaaaatattcgtgtcggtaaaaaggacgcaacggatgaagaagtgattgccgcagctaaagcagcgcagtgtgatgaatttatttcaaaattgtcggacggctatcagacggtgatcggagaaaatggttcaacactatctggcggtgagtgccagcgcctttctatcgcacgtgctcttttgaaagacgctcctgttattcttctggatgaagctactgcttctcttgatgtagataacgaaactgaaattcaaaacgcaatatccaggctggtaaaaggcaagacagttcttataatcgctcacagaatgaggacggtggaagctgccgataacatcgttgtattgtcagatggtattgtagccgaaaacggaactcacgaagaacttatgaaagaaaatggcctctatcataggctggtcgatttgcagacagcttctgcaaattggaagttaagcgtttaatcataaaaggaggtactgatgaaacttcatgcgtccggggaggactacctggaggccatacttgttctccataagaagatgggcatggtgcgctccgtggatgtcgcccggcacctggaggtcacaaagcccagcgtgtgccatgcggtggcgaccctgcgggacgggggcttcctgacgatggacagcgactattttctgcacctaaccgacgtggggcgggaagtggcggagcagatctacgaaaagcaccgcttctttaccgaccggctgattgaggccggcgcagacccggaaacggcggaacgggacgcctgccggatggagcatgtcatcagccaggagtccttcgagcatctgaaaaatgcttacaaaacaaaagaataataaactgcccgcatagcaaacgggtgaaacagtaacgcggccgggcacatcgaacccgaccgcgttactcgtctttctgaaaggcttccgcctgtttgcagagcgcgataaatttttcgatctctgcttcgcttttcccggcaaaaaagtccacaactgttttcgagactgtctgatttaccatttccgggaagatggcggcgtccacgctgatattcagttctttggcgacaaggaccaccgtttcaaatttcggattactctggcaggtctccaaatctatgattgtgcgggggttcataccgaggcgttcagctaactgcttctgcgtcagatgctggcgcttccgttctgaccgcaccttccatgcaaatagatccagcggattgttcactacacatcacctctacatcattgtagggtgtgcttccgctcatataaataaccatacagctcatgcaaagtgaattataactcatatttcggagtaaagggggatatggatgagagcgccaacacaaaggaggtcaaaataaggcggggtttaccgtttgtacggcggacgcccatgccactacgaaaaatattccaataacgcagcagcgagccatgctcatgaaagtgagttatggctcgctttttatatactgtggctcgtatctcacaaaacccgtttctttgagcgcctgggcgtgggctgccgctccccgccccgtttcgctctgacccactggcctgaacgaaacgaaaggagcttatctatgagcggcaagaaaattacatataatccccccgcaacgaagccaaaacggcctatcgctgaacgagtagtgagcgaaaggggaagaaaagaactgcctcccggcacgaagggaggtgagaacttgaaacctgaccgccactacgagcacaagcagcacgcctttgacagctactacaagaaggtgctgaaatacgaggcgtacaatggctatcgtgagatcagccgccgccagaagtgtgaggcattgttcagcgaactgtcggaggagaaattggcccagcttgcggtttatgaccgctactcctgggaatacacggccttccccgtgggaggcgctgtgatcctgattgaggatgaccggctggccgaggcgctgaacgccctgccccagaataaccgggacatcttcctgatgtactggttcctggacatggcagaccgcgagatcgccgagtacatgaacatggcccgccggacggtcaacacccgcaggcagaaagcctatcggctgctgaaggagctgatgggaggtgaagcggatgattaaatctgcgtgcacgcgggcgtcgctgatcccttatccggtgatcgccgccgctgtcgggggcaaccccgaagcggtgaaccgggtagtccggcactattccggctatatcgccgcgctgtctacgaggacaagctatgaccttgacggttttcctcgtccccaggtagatgaagatttgcgccggcggctggaaacgaagctgattatctccatcctgggctttgatctgaactgacccagggccgggcgctgcgtgttttccccctttccacgcggcgcccctatatagcaccttgacaaagaaagcccgttgggaggccaacgccgcagtataaggcaaacggatacattcctgtttgtgccgagccatacggccggtgcgccatgacctcgtttcaagtccgcaggacgggaccactgtaacgggcgagcgaacagcaccaggttgcaaagcaagcgtggcggcttgcaggcgatgacacacgggcagggttaaagatactcgcgcattgaacgcccacaaagcattgtgcgccgcacccatcagcatgggccggggttagactcccgtggagctgtgccagcagccgtccgtaagcctacttttcttttttgaaagtttatggatagatcgtaaacttttcaattagcagcagacaaacacggagcagcacggtaaaataatggtggaagttatattacccacacatattcgtgctgttccttttcataactgaaagggggttctcatgtctcaaacatggaacggcacgaagaaagaaacccctgaaagaaggacgtatacggttgacgatattgctcaaattctgggcatcggaagaacttctgcatatatccttgtaaaagaagggcacttcaaaatcgtgcgaattggtaacgccatacgcatttccaagcggtcatttgacgagtggcttgactccctcgacctgtgatccaagaaaggaagaacgatatggcatctataatcaagcgaaagaaaaactattccgttgtttacaactatgtggacgaaaacggagaaaccaaacagaagtgggaaacctggcatacccacaaagaggccttgaagcgcaaggcagaaatcgaaaatcagcagcacacgggaactttcctccctccaagcaatcagacgatcaccgagttcctttatgacttcgtatctctttacggagaaaagaaatggggcgtgtctatgtatgacagccaaacggcgctgattgcgaactatatcaatccgatcatcggtgatatggaggtacaggcggttactccccgtgcggttgacggttatatccagaccttgcagaaaaccaagtcggtgtctaccaaaacccgaaaggccgttaccacctatgtcagcgacaagaccattgaaaagatcatcaagctcctgcggtgtgcgtttaagcaggcggtacgatgggaaatcattgcaagaaatccctttgacaatgtgatcctcccgaaaacggagtatgcgaaacgggatatctggacggcggatatgatccgtcttgctctggacaaatgcacagacagcaaactctatgtagcaatgaacctttcctttgcctgctctctgcgtatgggtgaaatcctggggctgacctgggaaaacgtccatatctccgatgaagatattgcggcggataacgcctatgtctacatcgacaaggagctgacacgggcatccaaacgggcaatcgaaacgctgggtgagaaggatatctattacatcttcactccgctcatgccgaacaccagcacaagaattattctgaaaaagccgaaaaccgattccagcatccgtaaggtgtggctaccgaaaacgctggcctacattctgcgggaatggaagaagtcccaggacgagttgaaaggtttcctgggcgacgagtatcaggacttcgatctggttgtggcacttcccaatggccgcccctgcgaggatcgtatcatcctcaaagagtttgcaaagctccgtgaggacgcagggctgccgaaggtggtctttcattctctccgtcattccagtaccacctacaaactgaaactgaaccacggcgatctgaaagctacccagggcgatacaggccatgccgagatcgacatgataaccagtatctatgctcacattctggacgaggacagaaaggtcaatgctcagaaattcgagacagccttctatgccaaacctgatcttcgcaatgtccgtccaccggaagaaccggtaaaatcggagcctgcgaccctggaccttgaaagtcttgtggagcagcttcagaagtcgccggagctggcaagtgcgctcgcagccctgatagcggcgcaagccccggcaaagtgatccgaaaaatcgaattagcaaaacgcagaattttcttagcaaatttctgaaaagcgttcgagtccaattagcaaatatacatcatgcggcgcataaaaatctcccgataacggaagtgaaattaccgggagaaggaggaacaaaaaaaacgctgcaaaccccgaaaaaggcttgcagcggtgctttctggcgtcccagagaggatttgaacctccgaccccacgcttaggaggcgtgtgctctatccagctgagctactgagacatttataagttttatgcaattttcaaggctcaaaggaatcgaaccatctgccgcttaggaggcgtgtgctctatccagctgagctactgagacatttttaagatttatgcaatttttactgctcgaaggaatcgaaccatctgccgcttaggaggcgtgtgctctatccagctgagctactgagacatttttaagatttatgcaatttttactgctcgaaggaatcgaaccatctgccgcttaggaggcgtgtgctctatccagctgagctactgagacatttttaagatttatgcaatttttactgctcgaaggaatcgaaccatctgccgcttaggaggcggaccctctatcctgctgaggtacaagcgcatatttaatttatgaggcaattacccatctattggggaacacttttaggttctcttaggagcgtgacctctatccaactgagttgctgagacgtgttaaattggggtcataaagtgtactgtgttattgtaccgcacggcggcgcatttgtcaatcatattggattttcgcgcactgaaatatacacagaaaaagctttgaaaccccatgcaaattttccgcaaaaggtaaggctctgggtggcttttgccttgacgcttttcgctttttcgtctatactgatatatgtatgaaaacttatggaaaccaaacaccgcgggcatcgggaaatgtgcctgcacggaaaaaacaaaggattaaggagcccgatacatggtttttgccgatttgttctttatctatgtctttttgccactgtgcctcatctgttacggcctcgccaaaaagctcagcaccaaaaacatcgtgctgattgtcttttcactcatcttttacgcttggggcgagccgctttggattttgcttttgctgttcagttcattctttaactggttcatcggcatattgatcggcaaatttcgggataccccgcgcgcaaagttagccgttggcggcggtattttggtagatattctgcttttgctcatctttaagtacagcgcgttcattgtagaaaacctgaacgctgtttcgggcgcggccattcccgtgccgcagatcacgctgcccatcggtatcagcttctacacgtttcaggctatctcctacattttggactgctactgggaaacggtagacgtgcagccgaaataccacaaatttcttttgtacctgtccctcttcccgcagctcatcgccggcccgatcgtgcggtacagcgttgtggagcaggagatcgacaaccgctccgtcaacgcgaccgacctatgcgaaggtgcgctgcgcgtgattctcggccttgcgaaaaaggtcatcatcgcgaacaatttgtggtccatcgtcaacacgttctttggcaaggacatcacgggactttccgtgctcggcacatggtataccatcatcgtgtattcgctgtatgtttactttgacttcagcggttattccgatattgccatcggcctcggtcgcatgtttggcttccactttgacgaaaacttccggcatccgtttgcctgcaccaccattgcggagttctggcagcgctggcacatctccctcggctccttcttccgtgactaccttttgtacgtgccgttcttcggcaagccgcgcaagtatttcggcctgttccttgtttggttctgcaccggtctttggcacggtgccgcatggaacttcattttatggggcctttactacggctgcttcatgctgttcgagcagaaaatgggcaaaaagcgcatgaaaaagtggccgatcgtgtggaagcatgtgtatacgaagcttgtcatcatcctcggcttcggcatcttctattttgaaaatctcggccagcttggtcagtttttcctcaatatcacgggcatcagcatgattgcgaacagcgcgccgtttacggaccccatgacgttctcctccctgcgcaacaacatctttctcattttgttcgcgattctcgtcagcctgccggtattgccgaagatcaagagttattttctcgagagcaaaaacgataccgtttatgccatcggccgcgtcggctccgttgcggtctgtatggtgttactcgccgtcgtgagtgttctgctcgtcgataccacgaacaacgtgttcctgtatttcagattctaaggggaggtgctcattgacatgaacgattttaaagaccttgatcttgattattttgctccccgcaagcccgccgaaccggaagcgaagccggagaaaaccgaagccgtagatgcgccgactgcggatgaaagcgccgaacccgcagagcgccgccgcaagccgaagccgagccgccgcgagcttttgaacatgcggctttccgttttatccgtcggcgttatggtcattcttttcgccctgatgacgctgtatctgttccttttcccgcgctccaccgtctcacagattgaaaaccgaaaccttgcggaattcccgaaattctcttttgcatcgtatttttccggctcgtttacggcggacgtcgccacatggtttgacgataccgtgccgaaccacgacggctttaagaatatgagcaactccattaagaacctgtttggtatgaagatgttcgcttcaacggtcagcaccgcaaagcccgagacggacagcacagataacaccgatacttctgccgcaaacggtgacacccagacaaccacacccgcaaacggcaccgtgtcaaacaacacgaacctgctgcaatacgccgcagggcgtgtgtttccggccgtgagcgctgcggatgaaaaaatgggccgcgatttcagcaccgaggataacagcacactggaatgggtgaacaacctgcttgttataaactgggataatcactggcgctgcatggaggccttcggcggcggtggcggcaccgcttacgccaatgcactcaacgacctgcaaagcaaggtcggcagcggtgtgaccatttggtctatgcccgcacccaccgcttccgccatctacaccccgaaaaacggcattgattatgttggcgaccagaaggaatgctttaacggcgttgccgaaaagctgaatgccggcattcagtccgtaaacgttgtggacgtaatgaaaaagcatgcggaggaagatatttacctgcgcaccgaccaccactggcaggcacgcggcgcctactatgccgcccgcacgtttgccgaggccgcaggcgtgccgttcgcagacctttccacctacacggaagaatccattccgggctatgtaggcactatgtacggtttctcgcaggatacgcgtattttgaacgacccggacaatttccactacttcgtgccggcctcgaactacgtggcttcctactacgatacttcttttaactaccagtacgaagacgacctctttgccgatgtggacaccgcaaacgcgtacctcaagttcctcggcggcgactcctgcatcgtaaaagtcgatacgcagatgaaaaacggccgcaagctgctcgtcattaaggacagcttcggtaacgcggagattccgttctatacgaattcctttgagcagatctacgttgccgacgtgcgctatttggagtgcaacctcgtcagcttcatcaaagatatgggcatcacggatgtgctctttacgatgtccgcatactccgttgtgggcgataacgccgacaacattcagaacctcatcgcgcagaacgccggtgagaccatcaccgactcgcacattgtcccgtctgttacgccgaaaacggtcatgccgaccgcgacaagtgcaccaacgacgacttccggcacggatacggccgctaacaccacctcgaccggtacagaggatacctcttccgcaaaagaataacaaaggagagcctatgaaagaactggaatatccctttgacgccgcttacatcatcaaaaagcgcaaatctttaaagaaagcactgctcacagacggcacctcgcgcatcagaaagaagattgctgtgttcggcggctccaccacaagcgacattgtaaaaacgctggagcttttcctcttagacgccggtattgagccggaattttatgaatccgaatacgcgcagtattttcaggacgccatgttcccggatgaaacgcttttaagcttcaagccggacattgtgttcatccacaccacgaatcgcaacgtgacgaactggcccgagatgatcgacaccacggagcaaatagacgaaaagctgcacacggaactaaaccgtttcacggcgatgtggaaaagcattgcggaaaagttccactgccccatcattcaaaataactttgaaatgccgctttaccgcctgctcggcagccgcgacgcgtgggacatccacggccgcacgaatttcctcacgcgcttaaacgaagctttttacgcctacgcacgcgaaaatgagagcttttatattcacgacctcaactttgtttctgccgattacggcctgaaagaatggtcgaacccgctgttctggaacatgtacaaatacgccatgtgctttgaggcgatcccgtcctttgcgttcagtgtttcgcacattatcaagtcgattttcggcaagaataaaaaggcgcttgcccttgacctcgataacaccctgtggggcggcgttgtgggcgacgacggcgtagacggcatcgagatcggccaggagaccggcgtttcgcaatcctactacgagtttcagacctacgtaaagcagcttaaaagtctcggcatcgtgttgacggtctgctctaaaaatgaccatgaaaacgccattgcggggctaaaccaccccgaaggtgcactgcgcccggacgatttcgtcatcattaaggcaaactgggaaaacaaagaccgcaacattgccgagaccgccgcagagctgaacattctgccggattccatcgtttttgcggacgataaccccgccgagcgcgagatcgtgcgcacgcagatcaagggcgcggccgttccggacatggacggcgtggaaaactacatcacgacgattgaccgcagcggcttctttgaagtgacaaccttcagcgaagatgacttgaagcgcaacgaaatgtacaagaaaaacgccctgcgcgccgcggaaatggcgtcgttcggcgattataacgactatttaaagagccttgagatgcacgccgtcatcgatgatttcatcccggtgtaccttgcgcgtatcacacagcttacaaacaagagcaaccagttcaacgtgaccacccgccgctatacgcccgccgaaatggaaagcgtatttgaggacgacggctatatccgtctgtacggcaagctcatcgataaattcggcgacaacggcgtcgtttccgtcgtcatcggcagaaaaaacggcacggcactcgacattgacctatggctgatgagctgccgcgtgttaaagcgcgatatggaatttgccatgttggaccgccttgtggagcgctgccgcgaagtgggcgtagagacgattaacggctactactaccccaccgcaaaaaacaagatggtcagcgaccttttcggtcgcttcggcttcacgaagactgaggagcacgaggacggcagcaccgtgtggcagttgcgcgtcgcggactacaagccgcagaaccacgtgatcgaagtgttcggcaacgaccacgcagaagcgtgatcctcgctaaattaagtattaaatcaaatcacagaaaggaattttaccatggacacaagagaaatttttgaaagactggaccgcgtatttcaggatgtttttgacgatgacaccattcacgtcacgccgaaaacgaccgcagacgacatcgaggattgggacagtctggagcacatcacgctgatctccgctgtagagcgcgagttccgcatgaagttcaagatgggcgaaatctcctccatgaagaacgtcggcgaaatggcttccatcatcgcagcacgcgcaaagggctgatcttaccgcaaaagaaaatgccgcagacaaccgggttttcccgtgcctgcggcatttttatatttacggttatttataacggttcatgaagtcgaggtaatcgtcctccagcgtgcgcttcggttcttccttacgcggagcggtgtacgggtcagccgtttcctgctcggcggcacggcggcgctgttccgcacgtctgcggcgcgcttcgcggcgctttttgcgcacgcgctgcccgtggatgtacacgataagcagcaacaccgcaaagacaatgacaagcaccaaaacaaatttcaaaatgctgaaaatcaccgagccacccttagggccgctcgcttcggaggatgcactgctttcggccgcggaagattccgtaccgccggcggtggactctgcgctgcttgcagtgcccacagccgccgagtctgtggggttgccggatttatacgtttccgctgccgctgccacggcgttaaagagctttaaaacaccggcatcatatgcgccggtctgaaaatccgcttccagattatcgtgcagcaaagcgctcagctccgtgccggagaacgcgccgtgcaggccgtcaccggccaccgccatatagtcgccgtccgaaacagaaaggcctatgataagcccgtttttgctgtcgccgccaagcttccacgtgtccatgacctttttaaggtaggacacgcggccatcataatcggatttttcgccgggcaaagtgttcatggtgaacaccgcaatctgcacaccatacgtcgcattgaggtcagcgtttttatcgttgattaccgttttcgtactggcggaaatcacactcgcttcgtcatagacataaagatccgcgggctgctccggcacttcggcgtccgctgccgtcgcgcttacggtgctgcccgtgtcgcctccgtcttcggaagacgaggtgctcgtgtcgccgtttccggcttcatccgcaaacgcatacaggttgccggtggaaaacaccatcaaaaccacaaggcatatcgccgcaaagcgtcccatacccgctttatatagatttttcatccaatccctgcctttcggcagcccggctgtgcccggccgcgtaaaataataccgcacaaaacctgtttcgtagttttatgcggtatcggttctgttgtacctattttaagagaatttttcgctgctgtcaagtaaagccaagactttgcatcttacgatcctcttaaggttatttcagctctacaatcgtcacgccgctttcgccctcaccatatacgccgaggcgaaaggatttcacggccttgtggcggcgcaaatgctgctgaatgccgtttctcaatatacctgtacctttgccgtggataatcgtcagcatgttgagattgtgcatcaaagcgtgatcgataaacgcatccacttccatgagcgcttcttccaaattcatgccgcgcacatccacttcattgcgcgccggagcggaatccatcttcttcgtcacggtgcgatgaccgcctgcggctttcttcttttccttcggcttctggtcggtcaggcgcaggtttttcagcggcacgcgcgttttgatgatgcctgcctgcaccaaaatctggtcgccgtttttcggcacatccaaaacggtcgcaatcttatcgatgtcgtaaatcagtaccgtatcgccgacctgtaagggacgcggcaacacataatcttcgtctatacggcgctcgtgcaccgggtcgctgaccttttccatatcgcggatgcctgccttcaggcgcgctttctgctctgcggtcaataatttctgcttattgcggcgcaggtcttcgagctcgtctaacaggctctgggcttcgcggcgcgttttctgcacaagctccgccgcttccattctggcgcgctcaatttcgtgcttcgcgtccttttcggcgcggtcgcgcagcgcttcagcctctttttccatgttctgcgctttcaaacgcagctgctcggcactttcacgctcatcttccattttgcggcggctctcctccaagcgggagacgacctcctcaaacatagtgctttcatcggaaacgagttcctttgcgtgctctacgatgttcgccggcataccgagacgtgcggaaatggcaaatgcgttggaacgacccggtacgccgatgagcaggcgatacgtcgggcgcagcgtcgccacgtcaaattcgcagcaggcgttttcaacgccaacggtctgaatggcatatgccttcagctctgcgtaatgcgttgtcgccatcacgcgcgtgcctttggtgcgcatggcttcgatgatggaaatagcaagcgcggcgccctcgaccgggtcggtgcccgcaccgagctcatcgattaggataagactcttgtcgtccgcaatgttgagaatgcggatgatattcgtcatgtgcgccgagaacgtggagagagactgctcaatgctctgctcatcgccgatgtccgccaaaacgtggtcgaaaatcgaaacttcgctgccatccgccgcggggatcatcaggccgcacatggtcatcagcgtcaaaaggcccgccgttttcagcgagacagtcttgccgccggtgttcggaccggtgacgatgagcgcatcaaaatcactgccgaggtacagatcggtcggcacgaccttatttttatcgatgagcgggtgacgcgccgatttgatggcgatgcgcccctcctgattgagcttcggcacggtcgccttcattttgtaggcgagctgcccttttgcgaaaatgagattcagctccaccgccgcgcggtagctctggatgatgccgtccgcaaactcgccgatctcacgggaaagctccgtcaagatgcggtcgatctcgtccttttcgtccgagcgcaacacgcggatttcgttgttcgcctccacaacgccgatcggctcaataaacacggtggcaccgctgccggaggaatcgtgaatgaggcccttgacttcattgcggaactccgccttaaccggcacaacgtagcggccgccgcgttgggtgacaatggcctcctgcaaatacttttggtaggtctgcgagcggatcattttatcaagctgctcgcgcacgcgcagcgatgccgcgcggatcttgcgacggatagccgccaaggcgacgcttgcggtatcggcaacttcttcctcgctgacgacggtcatcgagatgcgatcttcgataaacttgttcggctgcaaggtctcgaagcggtaatcgagcgccgttttgacgctttcgctttttttacgccaatccgaaacactgcggatggcacgcaatgtcgcggcaacagacaataattccgccagattcagcacgccgcccgcttctgcgcgacgcagcgcattcgtgacattcgtcatgccgtaaaacgacggtgcgccgtactttgccattaaaacaaacgcgtcgtccgtttcctgcaaaaggcgctccacgtggcggatgtcggtatccggctcaattttctgcgccagctccgccgcatccggacaagtggtttcatttgcaagctgaagcagaattttatccagctccagcgctttatgatctttcagcattttgttcctgctttcttttcgtacccggttttgccgggtcaatctcctctgttaatccaaaaacgttttataaaactccaaggtcttcggtacggtatgtaatgtatggacaacgtagctttccgttgcggcgttcagaattttcagcgcatcctccggcagcgagaagttatagagcttttcaaaatccacatacgcaatgtgtcgcatggcggtcagcacgcccggcggcagcgcaacatacggttcattcgcgccgtgaaagcacttgtcgcacagaataatgcccctttgcggcagaaagaacatcgtttccgcctcatacgcggcgcagttttcgcacgcaactaaatttggcatatagccagccgacgagagcatacgcagctctgtcacggactgcaacagccgtatcggccgcgtgccctttgataaaaaatgcagggaatttaagatgagccgcaggtattcctcggaatccgtatcctccggcaccattaagtacgccagctcacagaaatactgcgccagcgaaagcgcggcgatgtcccgccgaatcccgaaaaagacctcgatcggctcggcatcgtcaatcatgtatttttcccgccccttaaaaatagaaaggcgggaatagcacaaaagctgcgttgcggcgcttttgctgtcctttaagtttttggcgcggcgggcaaacgcacgcaccacgcccgcgtcacgcgtcagcaccgtgacaaggcggtcgctctcgcccaccgtctgctcccgaatgatgagtccctgggtctttacctgcatcaaagtctcctgccgtaaaatccacgtcggcaagctcccggcgtgtaagctgcacgtagcggatgtaatcctccgccttgccgcttttataaaagctgttccacgcggcatacgccgcattctgcatcggggaatttcgcatacaaacgcctcctaaaccgtatggctgtttttagcttctgcggtttttgcgggttttatccgtggaaacgtctgtcaatttctcaaaatgtgaccgttttcccgaaaatcgcggtttattggtactggtcaaaatcgtgttcgttaaagccgagctttgtgaggatctgcgggcgctggcgccagtcctccttcacctttacccaaaggcgcaggttgatcttgcagccgaaaaagcgctccatgtcttctctcgccttcgagccgatttttttcagcattgcgccgcccttgccgataatgatgcccttgtgcgtggcgcgttcgcaatagattgtcgcatcgatctccgtcaggttgccgaggtcgcgcatgctttccgtcacgactgcgacgccgtgcggaatctctttatccgtaaagcgcagaattttctcgcgcacgatttcggacgcaatgacgcgctccggctggtctgtgagtgtatcttccgagaagaagtgtccgcccggctccgccagtgcgatgagctcctcacgcagcgcgtccatgccgttgccgtcctgcgcggagaccggcaccacagcttcaaagtcgtagagcgcggagagcttcgcaatctgctccatcaaaacgcttttgtcctgcaaaaggtcaatcttattgatggcgagcagcgccggcacacccaaatctttaaagcggtgcacaagctcttcatctgctttggagattttcgtatttgcctccacgacgagcaggcaggcgtccacatctgcgacggacgaggtaacgcttttcaccatgtaatcgccgagggagttcttcggcttgatgaggcccggcgtatcgatgaacaccagctgcgtttcgccctctgtccacacgcccataatgcgcgtgcgggtggtctgcggcttattggaaacgatggcaagcttcgtaccgagcaggcggttcaaaatagaggatttgcccacgttcggtctgcccacaatggcgataaacgccgatttttcgttcatgtagttttctgtatccatagttttcccggggcacgcagccacggtttcctttctgataatttatatctatatcactttttatgaagcttttcccgcacgccgcatggccctttgaaaatgaagaaaaaggccaaaatgagcgacagaatggaaagcacaaggtaaagcggatttgtgacgattgttatcaaaagcgctaagatcgcttccggccgccacaaaacggctataccgacaaaagcggcaaaaacggcgcacacaagcaccgctcccgccgcgatatcttttgttttgccgatgagcggattatagcttttctgcgcgtaatcacacagcatctcaatggcggtgttgaacgcttccgccgcgataaccatcgcgatggtcaaaagcagaacgccgtattcgctgcgcgttacgcccagaaagggcgaaaaaaacaaaacgtataccgccgctgtaaggtgtatacgcatgtttcgctccgttttcacggtatggaaaaatccgcgcgcggcatcgcgaaagctgtccgcctgcgtgcgggtcttaccgtttgttttccaatccggcaccatgttaaacggtgtagctggaagtgcccggcaggccgagctgcgacataacgtattcttctttttcacgcatgcgcacgcgctccatgccgccgttttcgtggtcatagccgagcaggtgcagcatagaatgcgccgtcaggtagccgatttcgcgctctaagctgtggccgtagcgctttgcctgcgccattgccatttccacagagagtacaatgtcgccgagaatcttcgcgccggtatcgtggttgatgtcatacacgccgttctcacccatggggaaagagagcacgtctgttgcggcatctttgttgcggtactgcgcgtttagctcgcggatctgctcgttgtccacgaatgtcacgctgatttcagcggaatcctcaaacttctccatccgcagaaccgcgtggcaacagcgacggatgagcatgcgcacgccggtcggcactttgaccgctttctggttgtttgtgatgatgactctgattttttccatatgctaaaatcctttcgataggggttattttgctgcggacgctttttcatacgcccgaatgatatcctgcaccaagcgatggcgcacaacgtctttttcggtaaagcggaaaacggaaatgtcatccacattgcgcagcacacgcatcgcatccttcaggcccgagcgtctgccgtccggcagatcaatctgcgtgatgtcgcctgtgatgaccattttggagttgaagccgagacgcgtcaggaacattttcatctgctcgcaggtggtgttctgcgcctcatccagaatgataaagctgtcgtcgagcgttctgccgcgcatgtacgcaagcggcgccacctcaatgctgccgcgctccacaaggcgggcgtacgattccgcgccgagcatgtcgaacagcgcatcgtaaagcgggcgcaggtaggggtctaccttctgttgcaaatcaccgggcagaaaacccagcttctcgccggcttccacggcagggcgcgtcaagatgatgcggttcacctgctgcgcacggaacgccgtcacagccatggcgaccgcaaggtacgttttaccggtgcccgcagggccgacgccgatggtgatggtgttattgcgaatattgtcgcaataattcttctgtcccaccgttttgggctttacgggcttgcctttcgccgtgatgcagatgcagccgtccgtaagcggcgccatctgtgcttcgctgtcctccatgaccatgtcgatgcagtagccgacgttctggtcgtttagaacttcgcccttttcgacaagccgcaaaaggctttctgccgcacgcaccgcacgcgaaacaccgggttcttctccgatgacgtggatctgcgaatcgcggcaggaaaacgttacaccgaatgccttttccagtcgctttgcgttcacgtcaaagctgccgaaaagctctgccgcgtattctgctttgtttacatgaatgcttctttccaaatcgttctccttttgccgcacagctttgaaaaaccgtgcagtctaaaaaaccgaatttcctgttttattatagcataagtgttcccaatgtggttatgaaattttcaacgaaatttagccgtttccctgtacatttccgacaaatacccctatattctccgaattttcaggctcttcaggcagggtgagcggcgcctcctgcgcaatgttttcaagacatacacaccgggacgtgacgtaaaccgcgccgtcttttgtctgatatgtgatgttttccgtaagcacacgcccgtcttctccaagcgcaagcttttgcagctgatgcagattttcaagtgcgcggcgctgcgcttcttcctccgtgaacgtaacgggcacggtctcctcctcatatacgcgcaccgtttccacccatagcggcaatgtgtgcccctgcaaaacgaacggcgtgcgggtgtatgccgtctggcctttcggcgcgccggaaagcgagagcggcacgcgcacgcccaaaatatacagcgcgcgctgtgtaccgaggtccgtttcacgcaccgtttcggtactaagcggacaggatgccgtgaatgtgcgctgtgtctccgccagaatctccgcacgggcgcgggtgtaaaaacagcgcacggggttatattccgggtcatacgggtcgcccacctgtgtgatgccggaaacgagcacctgccccgcggcgcaggcagaaccgactttcacgagcaccgtgccgttttgcgccgtgatagaatggatgagccccgcgcgtgacgcgacgatgtcccccgtgccgtcgtgctccgcgccctccgcctttgtgacggacgtgcgcagctcaagctgtacggtacaaccctccgtgttgaacgatgcccacgaaagctccggcaactcctccaaaagcgcgacagaggccaaagcggtatcggtgcttcgcggcgcgccgatatacacgccaacgcgctttgctgccgccaaaatttcgctttcggcatacggaatatcttcaccggagatcgtcatctcccagtaaaagccggaaaggaacagcatcagcgccacgccgagcgccgtgccaagcaaaagtcccggccggcgcagcatgcggcggaaccgaaacgggaagccgcttttctccgcaagcttcacccgcgcgtgcgtgcgttgtttgatcttatgcagctttttgtagtccttcgaatacaaggtgaaaagcacgtctttcccatccttttgaagtcgaatggggcgcagacccgttttcaccgcaatgttcataaaccgtgccgtatcgcccgaaacacgcgccgttgccgtgccgagcacccaatgcgtgattttcttcatgcgaacctcaccgcctcaatatgtcccgtgatcaccgcgccatcctcttcaagacacaaaagccgtaggctttgcccctccacccacacggcgcgccgcccacagcgcaggccgatcttttccgtttcgtattcgattacgccgtcacaaccctctaaaataagcttcgccgtgccgagaatctccgtgcgtatcgtgccgtcctgcatggcatagcgcagcttatctgcaagctcacccatgcgcccaccctctttctttttactcctctatacgtatgtgcggaaaaacacgcatatactttttcaaaaggagggttcgccgtgtcgaagcatacagaatttatcgcttttttcattcgccaaaaattgcagcttccggcgctttatatccgcaccgccgcgcttttactgctcgccttgctcctgctcaggcaccgcaccgctgccgccgcaggcgttgtcagcggcatccacacatgcctcggcacgctgattccctcgctgttcccgtttattttactcgcgtgcctatgcacgaacagccgcgcggcgcaggtgctgtttcgcccgctttcccccgtaatgcgtcatgtgttccgcctacccgcctgcgccgctcccgccgttttgttggggctcaccgcaggctaccctaccggcgcgaagatcaccgcaaatttatacgcgaccggaaagctcacaagggaacaggcggcgcggctgttatgcttctgtaccgcgccgggctatgcgtttgcggcagcctatacgggcagtttattattaagaagcgagcgcatcgggctgaatttattttttgcctgcgcacttgcgccgttacttctgggactcaccctgtcgcgctttgccgaaaaacccgaaaaaagcctaaaatcgccagaatctgctcccggcggcatcgtctccgctgtgcaggacggcattaaggccaccgtttccctttgcgggttcgtcattgtgttttccatgcttttggccgttttgcacgatgccggcatttttcagtatttatgcggttttctctcccgctttgggctcaccgtgccgctttccggcgcattgctgacgatgggtctggagatcaccgccggagtcacacagtgcatatattggcacctgccggtttattttttagcgttcgggctcggcttttccggcgtttgcatccacttgcagatcttctcctttttccacaaagcggggctgccgctgtcgaaaacgagatatgttctcgcacgctttttaaacggtctgctttccgctgcattttatttgctgctttcctattttctcccggcaagcacctcggttgccgtggaaacctcgcccctcaacaccgcgcccatggcgggcagcgcggcatcatccttggcgctcatcgcgctgtctatgttctttcttctcacgtgtattctccgcagcggaaaaacaccgtcgaaaatttgtggtggaaattccaccgggaaaatgctacaatgagaacaactctaagagcaacctgaaaatcggaggcgacgaaagtgttcggacgcaaaaagaaaaaacaaacacccgctctgtttggcagccgcattgagccggactgcgcttactgcgcgtttcatgcggacggcgtacagaaaaaatgtcttgcggggcagctcggcggagagcactgcgcaaaatttcaatatgacccactgcgccgcgagccgaaaagcgaacaaaagctcgggcagtacagcgccgaggaattcaaactatgaaaacttatcttaaagcgtttcgtttaaagcgcttttggctgctgcttttgctgcctgcggcgttccttttggacttcgccgcacggcagagcgcagattttgccgagtggtatgccgtgacgatctaccccgtgtacgcgcagttcttttccgccattacgggagtcttcccgttttctgtcggcgaattttgtctgatcgcgcttgtccttttcattttagcgtatctcattcacggcgtttataaactcattcgtcataaagagggccgttttgcgtactttgtgcggtttttgtcggttcctgttctcatcgccacgtgcatcgcgtttttgtgcgtaacgaactacggcacgaaccaccgccggtacagctttgccgccgtcagcggacttaccgtgcgggagtcctccgccgaagagctttacaatgtgtgcgcgtatttaatcaacgaagcgaacacattgcgcgaaaacctgcccgaagacgaaaacggtgtatttcagctttcaaacgatgtttttctcgatgcagacgaagcaaaatcatcattcaacagccttcatgatacgtattccacgctctacacaaacggaaaaccgaagcccgtgctgttctcggaagtgatgtcgtaccttgacatcagcggcatttactgtccgttcacgtttgaagcgaacgtcaacgtccacatgaacgacgtattgatccccgtgacgatgtgccacgagctttcacacctttccggctacatgcgcgaggacgaagcgaatttcatcgcatttttggcgtgcctgcaaagtgacgacccggaattccgttacagcggtgtgtatttggcatccgtccacgcgatgaatgctttgctcactgtggacagcgacctgtggaaccaggcggacgctttaaaaagcgacgcactgcgccgcgacattcggtcaaataatgcgtactggaagcagtacgaaacgcccgtttccgaggtctccgaccgcgtgaacgacgcgtatttaaaagccaacgggcaggaaaacggtctgcgttcctacggcagaatggtcgatctgcttctcgcctactaccgcgacgagctgcaatagatatagtttttttgggggagttctctatgtgtgaaaaaatcattgcggcgtgtggaaacgactgcgcggtatgtccgcgctacaacgtgccgccgtacaccaaaaccgcagaagaactgcaccacaccgctgagctgtggtataaaatcggctaccgcgaccacgtggtgacaaacgaggagattgcctgtaccggctgcaaggaagaaaactggtgccgttatcgccttgtaaaatgcgtgaacgaaaagcatatcgcacattgcggccagtgtgaaaactacccgtgcgacgtcatgaaagcgtgcttcacggtgacaggctcgttcatctccacctgtaaaaaagtctgcacacccgaggatttcgagatattgcgcaaagcatttttcgagaaagaaaagaacctgacgcaaaattaagacgacaaaaggcctttgcaccgtccaaaacggagatgcaaaggcctttttatgtacgattatttattcgcgttcatctcgcggacttctcttaaaatgtcctcaaggtcatatttttcgggcgctttcggcgcagcaggctttgcctgcactgtctgtgcagccggcttcggggtatttgccgggcgctgctgcacgggcttcggcgcaggtgcggcgggctttgcagctctcggtgcggcgctttgccgtggcgcgcgattcactgaggtctgcaccgcagcgcggcgcacgttctgtggctgcatggagaccggcgtttctggcatgatggggcgttctgcggtgtactccgccgacaccggcatcgccggcagctcgccggtgtctttatccgggtcaaaggacgtgggcatgcggggctctgcctcacggcgcgcctgcatctgctcgcggcgcatgcgctcttcttcgcgtcttctgcggttgcgtcgttcctcctgctcaatctcatccagcacctcggcgcggtccgcttcgccgctgtcgcggttacggcttgcacgctgccacaaaatgatgctgacaattccgccgacgccgagcacgatgcacaccgcacccgcaatgaacagcgtgcggccgacgccgttatcggccttcagctcattaaagaacgattccgctccgctgctgtcttcgcctgcggtgtcggtcgtgccttccgtggtgtccaccgtttcggtgctgtctgtggtatcggccgtatcggcttcatccgcaaaggtaagcggcgcacacagcgcagcgccgagtaaaaccgccgctaaaacagcaaatatacgtttagaaaaagtatttctcataatccatttcctctttcgtgataacttttatgtgtcacgattttgaattcatttttatttagtttagcatattttgcatggtgtttcaacggcaaaataaacaaacccgccgcttctctgcacggttcatgcagtcgaaacggcgggtgctgtgtctatttatacttctttagaaatcgatcttctctgcaatgtacgcttcaagctcgtcaatcttcacacgctcctgctccatgctgtcacggtcgcggacggtaacgcagccgtcattttcactgtcaaagtcatacgtgatgcagaacggcgtgccgatctcatcctggcggcgatagcgcttgccgatggaacccgtatcgtcaaagtcaacagaaaacttctttgcgagcgcatcgtaaacctcgccggccttttcgctcagcttcttggagagcggcagaatcgctgccttaaacggtgccagtgccgggtgcagacgcagtacaacgcgcacgtccggtttttcttcggtgccgaggttttcttcgtcgtaagcgtcgcacaggaacgccagcgctacgcggtccgcgccgagagacggctcgacgacatacggcacgtagcgggtgttcgtctccgggtcgaaataggagaggtccttgccggaatgctcctgatggcgggtgaggtcatagtccgtgcggtctgcaatgccccaaagctcgccccagccgaacgggaacagatactcaatatccgtcgtcgccttggagtagaaggagagctccttctggctgtggtcgcgcaggcggatgttcgcttcgtccagaccgaggttcaaaagccagtttttgcagaaatccttccagtagtagaaccagtcgaggtccgtgcccggcttgcagaagaattcgcattccatctgctcaaactcgcgaatgcggaaaatgaagttgcccggggtaatctcatttctgaagctcttgcccacctgacaaacgccgaacggcaccttcttgcgcgtggtgcgctgaatgctcgggaagttgacaaaaatgccctgtgcagtctccgggcggaggtacagctggctctttgcgtcttccgtaacaccctggaacgtcttgaacatcaggttgaactggcggatatccgtaaagttgtggccaccgcattccgggcaggcaatgttgttgtcggcgatgaactgctgcatctgctcgttcgtccagccgtctgcggattcgccggtgaagtcttcaatgagcttatcggcacggtgacgggtcttgcagtccttgcagtccatcagcgggtcggagaagccgcccacgtggccggttgccacccagacttccgggttcatgaggattgcggaatccagcgccacgttgtagcggctctcctgcacgaacttgcgtttccacgcgtttttcacgttgtccttgaaaaggcagcccagcgggccgtagtcccaagagttggacagaccgccgtaaatttcggagccggggtacacgtaacctctgtttttgcagagcgccacgattttttccatggtcttttcttcgggcttcagaactttcttcatttgttaaactcctttcgcgccgctggctgctgcacggcttcgtgcagctggatgctgcgcttgtgatttatcaatcataccacgtttttcaaagatacacaactaccgcggcgggattttatacgaaaaagcggcactccgcagagtaccgcccgaaatttccgcttgtttagatttattcgccctcgtccgcgatgagctttttcatctgcggcaaacggaacagaataaccgccgcgataactgtgaagatgagctccggcagcatgtaagtgccgttatagcagaaggagtaaagccacgggtggcccacccaggaagcgccgaacgccacaaactcatcaaagtttgcaaagataatggcgccggaaatgaagtggcacacaaagcgcagcgcaacagccagcgccgtgccgcagcaaatgcccacataacccttcttgcggaaaatacccgcaatgccgataaccgtgtaggccacgatgtaatcgagcaaaatcgtgccgatgagagcagaaggcgtcatgccccagccaaggatgccgtccatcgtgatgccgaacgcaagctgaatgacggattccacaaaggaagccgcaaagccccacttaaggccgtacatgatggaaatcatggcgcagggcagcatggaaagcagcgtgatagaaccgccaaacggcatctgaagcaccttgatcaggctgagcacagcgcccagtgcgaccataaccgcgcaggccgcaagcttttttgtattgttgttcttcatagttcattcctccggttttctaccgagatttagaggataaagcggagaaaacaaaaaccgcgcacccattcggcacgcggcataaaaagcacttagaataagcgtattttcctacgtcggcattatccgaatcaggtaacaggtttcggcgttcacgccgctctcagccgactttatacgtcagcaccctttttttacattcagtatagcacggaacttttcgcttttcaaccaaaatttgtgttttcgggcagaaaacaaggcttttcttgattttagagaaacaaaatgatagtataaaagaaacataagccaacgacaacggtggttaaaagttttgcttaagctttttcaagaagcttaaagcgaacgtgtgcgttcgcttaggttcattagggcagcgccctaagtcgtcgtccgcagacgacgaaacaccttttgcctaacaaaaagtaggatgggaaccacaattagggggtctccccatgaatttgcaaggcaaattcataaaataaaacgctaaaaccgatttaaactacggaaggacatataaaaatggaaagcacacagaacaaaacgcgctgtccgcacagcaaaaaatgcggcggctgccaactgcagaacctcgattataaggaacagctcgcgcacaaggagcgcacgtgcatccgtctgctcggcaaattctgccgcgtagagcccatcatcggcatggagaacccctaccactaccgcaataaggtacaggccgcattcggtaccacgcgtgccggacgcatcatctccggcatttaccagagcagcacgcacaacatcgtcgccgtggacagctgcatgacggaagacgaaattgccgaccgcatcatcgtcgatatccgccgcctgctgcgcaatttcaaaatgacaacgtataacgaagtcaccgggcgcggctttctgcgccatgtgctcgtcaagcgcggctttcagaccggcgaagtcatggttgtgctcgtcaccggtacgccgatcttccccgcgcgcaacaatttcacccgtgcgctgttaaagcttcacccggagattaccacgatcattcaaaatgtcaacgaccgctacacctccatgctgctcgggcagaacgagaaaacactctacggccccggctatatcacggatattctctgcgggctgcgcttccgcatttcggcaaaatcattctaccagatcaaccccgtgcagaccgaggtgctgtacggcaaagcgatggaatttgcggagctcacgggcaaagaaaccgtcattgacgcgtactgcggcatcggcaccatcggcatggtcgccgccaaaaaagccggacaggtcctcggcgtagaagtgaaccgcgacgccgtgcgcgatgcccgtgaaaacgcaaaattaaaccgtgtgaaaaatatccgcttcgtctgtgccgatgcaggcaacttcatggtagatatggcaaacgccggtgaacactgcgacgtacttttcatggatccgccgcgcaccggcagcgacaccgcgtttctctcctgcgcgctcacacttgcaccgagacgcatcgtatacgtctcttgtaaccctgaaacgctcgcgcgcgaccttaattttcttacaaagcgcggctatcgcgccgaaaaaattcagcccgtagacatgttcccccacaccgaccatgtagaatgcgtcgtacggttggataagatgaattaaaacaaaagaaggctttcccatgattcgccccgttaccgaaaaggatattcccgcctgcggatattttcaaatgccgctcccgaaaattacggaagaaaggtaaaaaaatatggcttccagtctcatgcactacgcaatcacggataaaattttgcaactgtttcctatgcacgacggtgcgcggctgcgctttggcgcggtactgccggacgcttccgtaaacaagcggaaaacacattttcgcatttacaatgaaaagctcggcattcggctttatgatcttgaatcgtaccgcgcgcagttcggcgagcgtatgcaaaaagatgacctttatctcggctactatctgcaccttatcgaggatgctttgtaccgcaaaacgctgtacgataccttcggctggaatccctacacgccggaaagcaccgcgcgcatgcaccacgattacacgcttttaaaccgtcatttcattcaaaaatataatattcgggatgaccttgccgtcccagaaaatttcacgcaggaaccgattttcgcttttgagccgtttgacgccgaaggtcttctgcgttcgattcatcaaaactttgtgcccgcgccggcggatgccccctactttttcacggctgccatggcggacacgtacattgaagacgccgtgcggctgtgcaccgcggagcttgaccgctttcactgcggcaaaacgcttctttccgccgaggatttcacctggacgccgccggaaaacaataagaatttctgaataaaagcaaaaacaccctcccgaagtgatggatatgtaccctatataggaagcatatccatgaccgacacgggagggctttttgatttctctttggaaagcagcttcgcggggcaaacgcgctttcctatgcgcattcggaattgacattccctttccgcttcggtacaatagaaccaacaagaacctcgggggacaaaacagtatgaattttctggaagaacgtatcgtaaaggacggcgttgtaaaagccggcaatatattgaaagtagacagctttttaaaccaccaaatggatgtacgcctgttttgccaaatgggcgaagagttcaagcgacgttttgcagataagtccatcaacaaaattctgacgattgaagcctccggcatcggtatttcatgtgtggcggcggaatgctttgacgtgccggtcgtcttcgcgaaaaagagccagagtgtgaatattgatggcgacgtatacgtttccgaagtggaatccttcacgcataagcgtgtgaatcgcgtgatcgtttcgaaaaaatttctcggccccgaggatcacattcttatcatcgatgattttcttgcaaacggctgcgcgctgcaggggctcatctctattgtagatcaggcgggcggcacggtggaaggcatcggtatcgcgattgaaaaggggttccagcccggcggcgcgaaaattcgtgagatgggctacccgctcgaatcgctcgccattgtggaaagcatggacgacgcaaccggtacggtcgttttccgtccacagccataaaaggagttttgtatgaaacggtttttatcccgcgttttgccccttttgctcagcttcggcttgattttaaactgcacaggatgcagcacggttttggtcttagccggtaaagctcgtgaaaacagcgaagcttcgtcctccgtgatttcggaaagctccgcgtcctccggcgtcatctccacccctgtgccgaccgaagacggcgacctgcgtgcgttttacacggatgttgcaaacgctgaaagtgtcacggtaatggtgtacatgatcggctccgacttagagagtgaggacggctccgcgaccgacgaccttttggaaatggcagatgccgcgctttccgaaaacgttcaccttgtactccagaccggcggcaccgaaacctggtggaacgatgtctgcacagacgatgaaagtgagcgctttgtgatcgaaaacggcgatatgacgctgctccaaagccttggcagcatgaatatgacggacgccgacacgctctccgatttcattcgcttctccgccgaaagctaccccgcagaccgctacgagctcattttgtgggatcacggcggcggcaccatgacaggcttcggctacgacgagctgtacgaagacacctctttgacgctctcgtcgctctccacagcactgtataacggcggcgtgcagtttgatttcatcggctttgacgcctgcctgatggcgacggcagaggtggcctacgccttggatccgtatgcggattacctcatcgcctccgaagaatccgaacccggcgagggctgggcgtacaaaaactggcttacgatgctggcggaagaccccgccgtacccacggcggagctcggcaaaaagctggcggacgatttccttgaggcctatatttttgccgacatgccgacgctttccgttttagacctgcgctatgtgccggaattatacgccgcgttggaaagctactggggaagcgcctacaccgcactgcaaagcggcagctacggtgcgttttcgcaggtgcgcaacaacgtgcgggaattcggcgacaacgaatacgaccaggtcgatctttccgacctcgccacgctgacaaagcagagcctttccctcggcaccgaggacgatgtgcaggccgccgttcagaatatggtagtgtataacgtcacctatgaaaagtccgccgcgggcattgcagtctattttccgtgcctgtggccggattattacggtgatacacgctttgaaatgacctgcgtcggcttcccggaatcgtattttgaattctacgataaattcatgaacacgatgctctccgggcagtcgctttcgcagagtgatatcgatttttactcctactacgattggttcgattcctccgaggttggcggcgaaaacgtcaccacaataaacggcaacgattttgaactcatcgacaagggcgactattatgcactctctctttccgatgaagcatggaacctcatcacgtacattgatatgaccgtttacctcgacgacggcgagggatatattgaccttggcaatgacaacgtgtacgagtttgacgacgacggcgacctgaaagtcgattttgactatacatggatctcgatcgacggcgtgattgtgccgttctacgccgaaaccgaggaacagacggacgattattggtacacaacgggttatgtgccggccgaactgaacggcagcaccgatattgagatcgttctgcgctgggacagcgaccatgacagcggctttgttgcgggctaccgcttaaagaccgaagagcctacggtagcggcaaagggtctgcacagctttacggagacggatcagattcagtacacctgttcgtattatgattacgatttcaactacgaccgggactacacgctcggcgacccggtaacatacacaagtgaacccgtcgtcaactatgaggaaatcggcgaataccgcacggtgatccaatacaccctgcgcgacatctacaacaacgaacactttacagacccggtagagctttcctgtgaataaataattctatagaacataccctgctgcgctccgtagcagggtatgtttcgatttgacttacactataataggcggtataatgaaaattactgacaaaaacggaattgtatggaaaactatgccgtttaaactgttcggaaaggacgaacgccatgcgaaagctcctcgtttacatgaaagactacaagaaagagtcgtttttagcgcctcttttcaagctgctcgaagccacctttgagctgattgtcccactcgtaatcgcgcagatcatcgacgtgggcattcagaccggtgacaccggcttcatcatctcccgctgtctgcttctggttgggttcggtgtggtcggcatggtcagtgccatcacggcgcagtattttgccgcaaaggctgccgtgggctttgccaccgggctgcgtcacagcttgttccaaaaaatcaacggactctccttctctcttttggaccgtgtgggcacttccacgctgctgacacgcatcacaaatgacgtaaatcaggtgcagaacggtgtgaaccttgtactgcgcctgtttatgcgctcgccgttcattgtgttcggcgcatgcgttatggcgttcaccattgatcccggcagcgcgctgctgttcctcattgtggtcgctctgctctccgttgtggtattcggcatcatgctgctgaccatcaagcgctacaaggctattcaaaaccagctggattccgttttgaacaccacgcgtgaaaatctgaacggcgcacgtgtcatacgcgcgttctgcggtgaagacaccgaaacagaaaaatttatcggccaaaattcgctgctctctaagctccagaaatccacgggccgtatctccgcacttttgaacccggttacgtttatcctgattaacgtcggcatcattctgctcatccattacggcgctgttcaagtcaacaccggcattttgacgcagggtcaggtcgtggcgctgtataactacatgagccagattttagttgagctcatcaaacttgcaaacctcatcatcaccgtaacaaagtcctttgcaagcgccgcacgtatccgcgacgtgctcgagctcgacacaaacaccgtttattccgacgacaagaaaatctacaatacccacgccgtcgagttcgaccgcgtttccatgcactataacgaaggcgcgaaggacgcgctcgaaaacatcagcttcaccgccgagccgggcgagatcatcggcgttatcggcggcacaggcagcggcaaaacgacgcttgtggggcttattccccgcttctacgatgcgtcctccggcaccatccgcgtggacggccgcaacgtgaattcctattcgcttgaagaactgcgcgaaaaggtgcacgtcgtattgcagcgcgcggtcttgtttcgcggcacgctgcgcgaaaacctgctttggggcaataaaaatgccaacgacgaagagatgcaggcagccgtaaaggctgcgcaggccgcagacttcgtacagagtaagggcgggctcgatatgaagattaccgccgaaggccgcaacctttcgggcggacagcgccagcgcctttccattgcccgcgcacttgtgggtaatcccgagatcctcattctggacgactccgcttccgcgctcgactatgtgaccgaaaaggcactgcgcggcgcgctttccgcactgccgaataagccgacggtgttcatcgtctcgcagcgcacatcttcgctgcggcacgcggataagattctcgtcttagacaacggcgcgcttgtcggatgcggcacacacgatgcgctccttgagaactgctccgtgtaccgcgagatctatgactctcagtttggcggaaaggaggcagctgcgaaatgagcaagataaataacaaaaacagtaccattaaacgtgttcttttgcaaatccgtccgtatctgccgaccatcattttgttgcttgcacttgccgtagtcagcgtgctgtgctcgctgtacatcccggtgctcgtcggcgaggccatcgacgccatcatcggcaaggaacaggtcaactttgccgttatcctgcctaagctcttcacctgcgcggtgctcatcggctgcgcggcgctcgcccagtggctgatgaatgtctgcggcaacaaggtcacgtacaacaccatccgcgatatgcgcgaggcagcctttaaaaaaattcaccgtctgccgttttcttacctcgacgcacacgaaaccggcgacatcgtttcccgcatcattgccgatgttgaccagtttgcagacggccttttgatgggcttctcacagctgtttaccggcgttgtgacgatcatcggcactatcggcttcatgctttctgtcaacgtttggacaacgcttgtcgtggtgcttgtcacgccgctttccattttggtggcgcgcttcatcgcaaagaaaacgttcgccatgttccgcttacagtccgaaacacgcggccgccagacggcattcatcaatgagatgatcacgaaccagaaggtcgtgcgcgcatacggacacgaagacgagaacatggagaaattcgacaccatcaacgaagagctgcgccgccacacattaaaggcgacattcttctcctccatcacaaaccccgccacgcgctttgtaaactccgttgtgtacgcggcggtcgcgctcatcggcgcttttctggccgtgaccggacagggcttcaccattggtatgctctcctgctttttgagctacgcaaaccagtacacgaagccgtttaatgagatttccggcgttatcaccgagcttcagaacgcgctcgcctgcgcagaccgcctgcttgaattcctcgacagcgaagaaatgtctgccgaccccgaactgctgccggagcacagcgagaccgcaaaaggacaggtcacgttcgataacgtttgcttctcctatacaaaagaccgcccgctcatccgcaatttcagcttggatgtaccggcaggttgccgcgtcgccattgtaggcccgacgggctgcggcaaaacgacgatgatcaatcttctcatgcgcttctacgacccggacaacggcagcatcagcgtggacggcacgaatacgcagactatcccgcgccgcgcactgcgccgtaacttcggcatggtcctgcaggaaacatggctgaaaaccggtactgtgctcgataacatccgcatgggccgcccggacgcttccgaagaagacgttatcgccgccgcaaaggccgcgcacgcacatagttttattgagcagctgccgaacggctactatacacagattggcgaagacggcggcagcctttccgccggacagaaacagcttttgtgcatctcgcgcatcatgctgacgctgcctcctatgctgattctggacgaagcgacgtcttccatcgatacacgtaccgagctgcgcattcagcgcgcgtttgccaagctgatgcgcggacgcacctcgttcgtcgtcgcacaccgcttatcgaccatcaaggaatctgatgttatcctcgtcatgcgcgacggcaacatcgtagagcagggcgaccacgaatctctgcttgcaaaaaacggcttctacgccgagctgtaccgcagccagtttacggatgaggaacagccggtgggttaacgcacaaaaatgcagccttctctattcgagagagctgcatttttcattttctgccataccgcacaaagctgcgttttgcactttgtgcggtattttttgaatatcaatatagtggaagttttagtcaatgcgtttgaggaaatcaaacggcaaaacgattatgataaagatataggcgaaccttgcccggactgcgcatgcgcaaactgcgtgcggaacgccttcggtgcacagccgtagcgctctgtaaataagcggtaaaaccggcttaagctgttaaagccgcatgcaccgcagatttcaatgacgggcatatccccctgcaaaagcagctgcgccgccaaagacaatcgcttgccgttgatgtactccgtcggcgtcatgccaatgtagcggcgaaacgaccgcgtaaggtgctcctgcgacatatttgcaagcgctaaaagacacggaagacctgtggtgtaattttcgcgccgctccattttttcaagcagctccgaaaaccacgcaggcaaaatcgcttccggcgcgggtgctgtaagaaacagctgcaccaaatacggaaacaggcttaaaatgtagcggcacgccgtttcgttatcggcaaagcggttcgtgttcaaaagcttttcctgcacatccgttaaggtgtggccggaaagcacacaatgtaacggcagctccggcgtatcaaatatggcgcggtcaagctgcaaataatcgcacaagcgctcaaacaccgtgcgcggaataccgatatcaagcagctcgaaatccgcattgttgaaaaaatcatagcggtgcacgtcccttgggcgcatcaaaacgaacgagccctcggaaagcaactgcgagcgtccatttacggcgtggatggccccgccgtgcgagacgagaaacagctcgtaaaaatcatgcgtgtgaattttatacgtcgccggcacaccgcactggtgcagaacgcgcgcaccctcaccggtgtgcagattttcttcggaaaaatgcagaagctcaacgtcgctcatttcggcgccccctttcttctgctattataacgcgtcaaaaaaacggaatcaagaaatttcaattctaactttgggaggataacggtatgttcaagaccgatgttcaaaaactgcgcaatgcgttggaattcacgcgcgtttacaaagagaatgcaaacgacatttacctgcgtgaagccgcctgcatggattttcagctccgtcatatcttagtgccaatggatgaaaacgacggcatcgcgggccgctatgagcacgactttgtgggcttttcctcgcaggtcggcggcatttacacgtattactttaacgagcatgaatttttgaacgcatacatggcttgtaagcaaaacggtgagatcaccgctgcggaggactacgctttgcaggctgtgcaggcctattggcacgaggaaaacaccgcgcgcaaggttgaattggaattttcgaagtgctacggctatgtgccgccgaaagcttttcccggtgcgggcgtgggcaactgcgactgccgcgtggcaggtacaaacctcgattttgaaaagctcatccgtctcggctttgacgggctcgatcaggaaatcgaccgcgcggcggaagtgaacggcgcgtcttcgttctacacggctttaaagctgtggattgaaagcctgcgcggcgcatgcgagcgttaccgcgaacaggcattggtgcttgccgaaaaagcagagaccgaagaagccaaaacgcgctttacaaagcttgccgaagcacttttaaacattcagcacagcacaccgaagacgttccttgagggcgtgcagctgatgtggatctacgctgtcagcagcgacattatgaattacagccgcatggacgattaccttgggccgctctacgccgcggatatcgacgcggggcgcatcacggaagaagaagccgtgcagaccgtgctgtatctctataagcactttaaagagattaacaagatccatgactgccgcgtaatcatcggcggcgtaggcagaaagcaccagaaggaagccgaccgcctcgccatcgtcatcatggacgcttcccgccgcttccgcgagactgtgccgcagctcaccctgcgctattacagcgacatggacgagaccgttttccgcaaggcgatggaagtgaatgcggagggcactacgttcccgattatttactccgatgagacgaatgtaccggctgtggaaaaggtctttggcgtttcgcatgaggaagccgagcaatatgtgccgttcggctgcggcgaatacgtcatggtcggttacagcgtaggcacaccgaacaacggcatcaacgtgctgaaagcgctggaaattgcgctgcacaacggccttgatttctaccagaacgtttcctgcggcgaaaagaccggcgacccggcgcagtttgatacctttgaaaagctgtatgacgccgtgcttgcacagctcaagccgaccattgaccgctttgctgtacacaaatacctcaactataaaattgcaggcgaaaacgcgccgtatttgcacctcagcctgcttttgaacgactgcatcgcgcgcggcaaggcgacgtttgaaggcggcgtgcgttacctgaatgcttccagcgaaatgttcggcatcatcagctgtgcagacagcctgacggccatcaaaacgctcgtttacgacgagaagaagctcactttgccggagctcatcgatgtgctggatcacgattttgaggggcacgacgatattcgccgcatgtgcctttccgcaccgaaatacggcaacgacgacgacacggctgacgacatcgcaacgcgccttttcaccgatattgccgaccttaccatggcggcaggtaaagctgcggggcttgaccactacaatattgtcagcgtcaacaactccatgagcgcagaatggggtaacttctgtgcggcgtctgcctgcggcagaaaggccggcagccccatggcaaacgccaacggcgcttccatcggcgcagataagtgcggcattacggcgctgctcaactccatgtcgaagtttgacaatacaaagcacgtgggcgttatcaacaatgtgcgcttcacaaaggagctcttcaagggctctatggataaagtagaagccgtcttgaaggcgttttacgacaacgacggcgtgcagacgaacctgtgcgtcatcggcaaggatgaccttgaaaacgccatggtgcacccggaaaactaccagaacctcctcgtgcgtatcggcggcttctccgcgagattcgtcacactgaatcctattgtgcagcgcgagattattgagcgtacgacctacggcgcgtaagcggaggccgatatgcgggatcttatttttgatattcaacgtttttgcgtgtatgacgggccgggcattcgcaccaccgtgtttttcaaagggtgcaacatgcactgtgcgtggtgccacaatccggaaagcttttcaaccgatgccgagctcttgtttcgccacgaaaaatgcacgccctgcggggcatgcactgcggtatgtccgaacggagcgcatgaaataaaagcagacggcacacatgtttttgaccgtgcaaaatgcgcggcgtgcggcaaatgtgccgaagtatgtccgaacgatgtcctggagctttccgggcgcgaaatgacggtggaagccgtgatgaagcagatcgacaaggacgcaaaatattaccgctcgtcaaaaggcggcgtcaccttttcgggcggcgaggcttctttgcactttgaactcctgaaaaagctgcttacagcctgccgcgaaaaagggtaccacaccgcgctggagacaaacggtttgatctctgccgcacatttaaaagaactgataccgctcaccgatctttttctgttcgattttaagcacagcgaccccgatgccctcaaaaaatgggcaagcgcgccgcttgcgccgatcctcgagtccctggcagcccttgaggacgcgcatgcgcatgtgtggttgcgctgtccggtcattccgggcgtgaacgacacggacgcgcactttgtgaggcgatttgtgcgctcaagcatcaatatacctgtattgaaaaggccgagatcatggcataccatgacatcggcaaaacgaaatgggacgcgctggggataccgtattcgctcgccgcgctgaagaccgtttcgccggaacagaaacatatttgggagactaaaatagccgattagcggcacttttggggataagagagggaacgcttcgttccctctctttgctttatctcccacattttttctaaacatttgacagatttcccggaatattgtatgctatggaaaacaccgcaaattttccctgcgggaccacaaacattaggaggtcacttatgttttgtatatactgcggcgccaccttgccggagggcgcgaaaaaatgcacactctgcggcaaccccgttttgcgcccgccggaagccactgcacaacccgtaagcgaaccggagtcggaatctgcccccgcatcggaaacgcccacggagcctgccgtggaagacatctcctcaaattcgacagagagcctctccgaagcggaaccgacacccgaagctgaagataccccttcaaacagtccggacagcgaagatatttacaaccattccccgatggacttcacggaggatatttcctccggcgatgcgctcggcgacaaacccgaaggcatggagcacgagggcacattcaccgtttcccccaccccggaggaaatttcagggccggagccgcgcgtgcaacccatagaatatacgtataacgacggctacgcctatgaagaatacgacgaaaagccgaagaaaaagcgttcttttaaatggcttttcatcgtgctgcccattcttatcgccatcggcgctacaatcggcggcattttctggtggtacaatgcacccatgcaaaagctcacccgcgcgcttgacgcttacgattattccgctgcggcgcaggtacttcccacgctttcaaaggacgaactcgcttcggtctccgaccaaatgcaggaatatgcccagacggtcatcgaccgatacaataaaaacgaagcgaactacgacagctcctatgagctgctcgaccgcctgcaaaagctgttcccgaacatcggtctcgacgatcagctcgacggcattcaatcgctgaaagactccaaagaggcctacaaaaacggcaaaagcctgcaggcacagggcgaagacggccgcgccattacggaatatcagaaggtcattcacgccgatgtgaaccacgacgacgcgcagacgcaaattcaaaacatccgcaccgcgtacaaagaaaaagtgttaagcgatgcgcagagccgcgcggacgagaaagatttcctcggtgccgaagccattttgatgaacagcgccgatatcctcggcgatgataaagacatccaggctaagctggaagagattaaggacgcagagctcaacaactacgtggaaacgctgctcagcaccgccaaaacgctcgcggatgacggcgacctgcccggcgctgttaacgtgctgcaggacgccacacgcagcgacaagcgcatcgatgcgcagattgccacctacaaaaaccagtataagcaaaaaattctcgatgctgccgcaaagcaggccggtgaaagccgctattatgacgctgtggaaacgctgcaaaacgccgacgacatcctctccggcgacagcgatattgcggcaaaaatcgaagaatacagggcgctttaccccgtttcgctgacagatctttctccaagcggcggcgaagattgcagccagaactggacagcctatgacgtaaacggcaatgcgtacagcaacggccttaacttctcgctgtaccctgtcatcgcaaaaaccgtctacaccgaatacgccccgaacggacaatataagcgcctgacgggaacatgggtcgtagagggcgatacctccgacgatttcatcggcacggttcgcatttatgtggacgaccatttgcagtatgaagtttcctcgctcacggtgaacagccccgcaagcgcgctgagcctgagcatttccggcgcttccaccgttcgcattgaagtggagggtgcgttcgcctcactgcgtgccgtcggttatctgtaccttgcagatgcgaaatttgaaaactaaaccgctataaaaagagataccgcacagggtaaactcaccttgtgcggtattcttttgcgcaaagcctgccgtgcggtctatgcacgtgcagctgatccttccacaacacagaaaaactctgtggaaaacacaacgcgcataagaaacgggatgtccctttttgggggacatcccgtcttactttggcttacgccttatgcttttgttccatcacgcatttgctgcgttctcgtcttcgtcgttttcgtccttcttctttttgcagaggaccataacaacgacctgtaccagcgcgattacaacatggaggattgtccacttgtcgacgaagatcatcggcagggtcatgtcttcggtgaagatgaagacgatgatggcaatcagagccgggatgatgctgatgagtctccaaaggcccttcttgttcttttcgtactccataacctctttgccgttctcatcgagaaccacgttgccgtcttcgtcttccaacgccttctttttcttgccgatatagccgatgagaaggaggatggaaaggagggtcgtcacgatggtgaggatcaggttgatgagtgcccaagcgcccgtgccgaggcctgcgagcggcgttgcgttatctgcgatgtcttcaccgtttgtaagcggtgtttcgttatctttgatcgtttcgcctatttcgccgtcattattgccgtcgccttttccgccgttatcgctcggcgttgtggaaggtgtggcagtcggtttcggggtgggtgttgcaaccgtagccggaacgaccggagctaccggcgtcggagtaggtgttgccgggttcggattcgggttcggatttggagccggagtaggtgtagactcttctgtcggaaccggagtaggtgtagactcttctgtcggagccggtgtaggtgtaggctcttctgtcggagccggagtgggtgtaggctcttctgtcggagccggagtaggtgtaggctcttctgtcggagccggcgtaggtgtaggctcttctgtcggagcgggtgtaggtgtaggttcttccgacggagccggtgtaggtgtcggctcttccgacggaatcggggtcggcgtgggatttgcttcccaaacagccttcagcacaacgtccttagccggcatcgtgaacgcatcgttctcgatcgtaacctcttcgcttctccaacccgagaacttatagccctctctggtcgggaccgtctttataacctctactgttgctttgtactcgtacttgaactcgttggtcgcttcagtccactcgccgccgttgaggtcgtacgttacattgtacttgttcgtggtcttctcatacactgctacgtaagtctggttgcccttaacttccgtgtagtccttatcccagcccttgaacgtgtacgtatactgtgcatctgccgccttcgtcggttcaacaccttcgaacttcggtattgctccgtactcgtagtccttctggtcgatgagcgtcgttccgtcttcatctacccactttactgtgtacttgttcgtggtcttctcatacactgccacgtaagtctggttgcccttaacttccgtgtagtccttatcccagcccttgaacgtgtacgtatactgtgcatctgccgccttcgtcggttcaacaccttcgaacttcggtattgctccgtactcgtagtccttctggtcgatgagcgtcgttccgtcttcatctacccactttactgtgtacttgttcgtggtcttctcatacactgccacgtaagtctggttgcccttgacttccgtgtagtccttatcccaacccttgaacgtgtacgtatactgtgcatctgccgccttcgtcggttcaacaccttcgaacttcggcattgctccgtattcgtaatccttctggtcgatgagcgtcgttccgtcttcatctacccacgttaccgtgtacgtcttcacctgccaaaccgcatagagatcgttatcgccgttagcgtcgacaaagaccgtagcgcctactttgtatgtaaccgtattgctgtccggcgtggttgcccagccgaggaacttgtagcctgtgggagcggtgaagccgacatagtcacgcgatcttacggttgcggtcgtattcttcgggtaacctttgtcttcaaagatctgcgtgctgccctcgaaattataatgatacgtaatcttcacggtttggggcttattggtgtagactgccctcaacgtggtgttctttgtgacggtaatcttatcgcccgggtggatgagcgtgccgtcttccattttccaagcgaggaagttttcggaattttccggcggaagtacgcgggcggagctgccgcttacatacttctggttatccgtttttacattcgtaccctcaacgtatgtgaccgtgaagccatcctttgcggaggggaagaacggggaaatcgtaacggagctgtaaagctcggtatctacattgaacagcgcgccgttggaatcaatccaagcggagggctgttcctccttgaacttttcaagcagtgccttaaaatcttcggaatccgaaagctttgtgccatacggaatttcaatcgtttgagaatctccgtccgcagaggccgtcaggtaaaccgtagctttaataaccggcgcctgccactttgcgtagagcgtaatgttctgtgcgggcatcgtcttgccggtgaacacgaacgggtcgcctttgcaaagctcattctcataccagcctgcaaacgtgaagtttgcgggtacaccggtcggtcttgtcgggggggtgtatgtcacatcggaaatattctgctgatacttgcggctttcggttttttctgtcttaccgccgttaatgaacgtgatatcataagagttacgggtgtagtagaatttggccttattgtatttgccgtgaataggagtacttacatttgcgttaaaagtaaaacctgtaatcggatactgatcttcttttgttacgttatagcctttaccggggcttgtatcgcggtgatcttctttataggttattccaccgacagtagttgttcccttctcgcccggcagaacttccacataatagtatgcagtctcactaccataaccggtcatcgggccatagaacttggcaccgtttaatggcattgtatcaatgttaacctggcttgtattactatttttgccaatataccatgtactgctgccgttataagtaggccacttatcacggatattcgcgccatatttggccgaaattctcagatctgtgtattctttttttcctttacgatcatagaaatttacagtgtaaacatttctcttataataaatgtttacgatcgtggaaccgtcaccggcaatggtcttctgctcaatcgtctgcggcgcagtaaaaccgtcatattctttcgccgcagctttcgtttcagaacctgttttgccattctgggtttcagtttccttcaacgaatagccgtcgtcatttgcattttcctgccaatggaaaactctatactgtgtattggaactttctgtccactgtgcagtaacggtcgcttctgcagaaaccgttgtgaccgggttgccgtttgcatcaagccaacctgtaaaggtgtagccgttgcgggtgggggtgaccgtgctcaggtcaagcggcgttcccatctggaactgcggcgccatgtagtcgccgccgtcggtattaaacgtgacccagaaaccggttttaactaccgggtaaacgtatgtaacgccggctgcaaatgtgatggtttcgggggtatcgctgccctgcgtggtgctccagccgacaacgcctttatctttgctcatggtgagctcgacttttgcggtcgcggcgttcagaacgtcttcgccgaccgtttcaccggctgtgcccgcggcggtgtggtaaaccacggtatcgccgtcttcatccaagaagtacacgtagctgtactcctcaaacctcgccgtaacggtcacttccgtaccgctgacagtcgcgactgtgccgaagcttaacggggtcttaccgacataccacccaacaaagcgtgcgttttcctttgtcggtgcagtcggctcgaggagctcatcgcctttggcgacggtctgttgccactcggtcagctccgtgccatctgcatcatagaaacggtaggtatcgaccttgggcttctcgtcgtccggacgcagcatagtcattgcaatgcccgtttccgcactctgtttcgccggtgcagtttcctctgcacctgcggcgggggtcgcctgtgcttccacttcaacgggagccggggtctctaccggggcgggagtggctgtctcctccggaacgggagtaggtgtctcctccggaacgggagtaggcgtctgctccggcgcttcggtcgcctcgggcgcgggcgtctcgtcaacgaccggcgttcccccctgcataacatcccctgttgcagtgtaggtgtttgtttcctcatcactcattgcaaacgcgcccgtaggacatgccgaaaccagcatacatgcgctcagcaacacggcgatgatcttctttttcatagtattttcctccaatcctgtgatttgtccgttttataacaaatatggattcctaaattgatgtgtgttactgtgccaaaaccgtttccatttggatgagcagctccagcacactgcggaacgcggcctctttgccgccttttgtccaccgcagtctcccctgccagctgtaattctggcggaacaggatgtccagttcaaacgtgggtgtttccgtacattttatgggagaagctttcggcgcgccgcctgtatccagctgctcttccaaaagcaggatcaggcgtgaaagacttcggaatagggtttcctccgggaacgtcccgccggagaccctgccgcggatgacaccgtcctccgcttcatccacaaagatacggaaggtctctgtgccgatcggtagcatacgattttctttcacctaacccctcccttttgtattttgtgattctattttacacaaaggtgctatgagaacgctatgattaagaagtttttttatagaaaaacgacccattttctcataaaaaaagaaaataggtcgtagtttttttgctaactgtgctgcgtcaaccggctcgttttttcaggtgacggttttaggcctttcggcgctccgttttctccgttgctttttcttctgcgctcatatgtatgtggcgcaggtcgagcgatttaaaggtgtaggccgcaccgcttttcgggtattccttttggaaccgattgaacacacggcgggaaacgagcccgccgttttctccggtcgcacccggcagcagcacccaaaactggtttgcgcccacctttgtgaacggatcgcccgcgcgcagttcgtttaaaagcgtcccttccatctgcttcatatatatagcacgcttttccgggtctatcgagcggtttgcaagccgcacaatcatcaacgccgcaggggtatcgtttcggcgcatctcgcgcacatgcaggtttacaatctctcggaaaacgttgttatcgcagcaaaacgcaccgggttcctgttctttttcaagcaggaacgtgtgaatatcgtcttcactcgtctcgctgccgtaaagctcctgcaccgcaagcgccttctgcgcctccagctccgccgaaggcgaaacaccgtagacctcccggtacagcgcagcgatgtaatcatagtgttccagcgcttttttcgggcttttgttttttatgagcgcctgcatcaaaaacacgctgaattcttctgcggcgggatctaaacggataacgcccgtgcagagcttttccgcatccgtaatgcgtccgagcttcaaaaggcgatccaccgccgcgcgacataggcgcgtataaagcgagcggtaatacgtgttgaggttgatgcaccagaactccgctgcgctttccgtaagaaaatcaccggtgtaaagcgccacggcttcctgcgccagggcaaccgatttttccatatcttcttcggcaagcgctgcctttgcaagtgtttcaaattgctccacgtcaagctgcgtctcgcggtccggcgcccagcgataatagcccttttcgttatggatgataacctttgcgtgcgtaaagccgagctctgccagcgcagcccttgcgcggctgacattattttgcagcgtgcttaacgggttatcgttttcggcttccggccacagcaggtcaatgagctcctgtgcggaaacaccgcggtttctgttcagaataaggtatgccgtaagcgtccacagtcttctggagcgtcccgtgaggctcacggcgtgcggaacctccataccttcctgctttaatgtaaacttgccgaacatggtcacattgatcttcggcacaacctgtatcgtttcaccgttctgtgcttcacacggcagcccggtggtttcaatttctttcgctgttcgactcatgaacggttcatctccctctttcagaaataacagttcaaaatatcaccccggctattgcgaaaaaaataatattccgaacttgttcttttcataaagtatagcacgcttcacggcatttgtaatccaccgaaaggtggaaaatgcgatttttctcataagtatttacttttttgtcggagaaaataccttttttggcgaaaggtcgcgctaaaaactatgacttaaagtaattgcagacgtttttgcatggtctcatagttcgtgcagtagtaaagcgccgtctcctctgtgatgcgcttttgccgtataaggtccgcaagcgccatgtccatggtgcgcatgccctgcgccgcgccggaagcgatggcggcatcgagctgatgcgttttgctttcgcggatcatattgcgtatcgcgagtgtggaatacatgatttcaaacaccgggatgggtgtaccgtctacgccgggcacgagctgctgactgatgaccgcctgcaaaaccatggaaagctgtaagcggatctgcgcctgctggttcggcggaaatgcgtcgatgatgcggtcaatcgtattcgccgcgccggtggtgtgcaggctcgaaagcaatagctgccccgtttcggcggcggtcatcgcgacctccattgtctctttgtcgcgcatttcgccgagcaaaatcacgtccgggctttcgcgcagcgcactgcgcaaagcggcgacgtagctcgggcagtcgcagccgatctcacgttggctcacaatgcacttatcgtggcgatggatgtactctaccggatcctcgagcgtcagaatatgtcccgtgcgcgtacggttgatctcgttgatgatacacgcgagcgttgtggacttaccgctgcccgctgagcccgtaacgagcacgatgccttttttcatctgtgccgcgcgcatgacctccggcggaatgtgcgcttcttcggccgtaggcagaccgaagcggatgacgcgcaccacggcggcaatgctgccgcgctggcggaacagattcacacggaagcgtcccgtaccgctgagcgagaacgaaaaatcgtcatcggtcgcactgccgtttaagcagtgcggctcacgcgcggcaagacgatagatttccgctgcgaatgcttcggtcttttcgggcgtgaaggcgccgtccgccgtttcacgctgctgttcgccgcgcaccttatacgtcagcggcaggcccgccaccacgaaaatatcggaagcgccgcgctccacggcacttttcaaaatttcagtcatattcattgtactccgcctttcttacccgaggttcagggagtcatccggctgccagcgcgctgtgcagcgccattttgcaatctcatagctgccgtttatcttatttaagcagatctcaagctgcatgttgccgcgcgtgatttccgttttgagcgtggtttcggtctcttccgtgttttccggcagatctcccgcgccctttaaatacgcatctgcttcggaaagccagtcttgcccggcgttttcgcaggcgtacagcacttccacgtgctcgccgtagcgctctgcggcacggcgatcggatacggcagaggacaccgtaagcacgccgaaaatggcgacgcacagcacaacgaccgcgaacagcaccgcgatgctgccgatgcggaatcgatttcggctcatggcgttccctccttcggctggtagcaccgtacattcagcgcataaatttctttatcctgccccgccgtgtacgccgtgattttcccggcatacaacgctcccgtttcggtctcggcggcggtcacttcggtttctatataatagtaagcgtccgcttccgcacagcttgccatatcttttgtgaaatatgctttttcgccgttttcggggatctctcccgcgcgaaactcctctgcggcgctgcggcacagcgcaatgcctgcgctttccctcgccgcttcatcgctgatgacggccgcgcgcaggaacacgcacgcaatgacaccgcagcacgcgacaaatgccagaacaaacacaagcagcggggtcatgaagcccatgcggtggcgcgtttcactgcgcttttcctcgtaatctatcatgccgcgccacctccgtcacaatacgcgccggcggtcatgccgtccgcagtgatcgttaaaagcccgctttccgaaagctcggctttaaacgttttaaggtcgcacagcttttcggcgttattggggtcgatctccgccgtgacccgtgaaaactccgtgcgcagcgcgttttcatataaatagatgcgcgtttcgaagtcgctttccggctcgcgcaggcacaccgccgggccctccgggccgtcgatcaggcggatgttccctttgccgccgcacgctgccgtttggctttgaatatacgaaagcgcgctgcgctgctttgcgtgtgcgtcgcgggcgtccatcgtatcggaatacagccgcgcgcccgcaagcgtcaacaccaaaagcgatgcgatgagcaatgcatacagcagaagcagcatcagagaagtgctgtttctctttttcggttccgtcatgcgccctccttattcctcgccgcgcaccagcacctgaacggtcggcagctggttatcggcgaaaacctcgtatgtcacgatgtattctttcttattgaccgtaagcccgtagtgcttttccaaatattcaaggctttccgggtatgcgccctctaaggtgtagcactccacggcgctgcgcaaaacggcttcacgcacggcggcacggcctgtttcgcggatatcctcctgaaaaaccggcacgcacaccgcggtaaaaagtaccgcaagcaccagaataagcccgaccgcgaaaagccggaagcttacttttcgattcaaaatgcccatagcttttccctcagattgcgctcaaaatgccgagcaagggcagcatgacgcttaaaagcgtcaaaccgacagacgcggtgagaaatccgatcaaaatcggctccgtgcggtcgatgacgctgcacagcccgttttccgcctcctgcgccgtgcggcgcgcgaggttttccgtcacctgcacgagctcgccgctccgcgcaccgccaagcaacattttgccgtacatggcaggcaatatcttttggtgcgcaaacgctgtcgcaatgccgacgcccatctgtgtttcttcacggcatttttcaagcgcttcgtgcagctttttgtggcgcgtctgctcgatgcacagcgcaagcgcactgtcttcatccgtaccactcgcaagcaaggcggagagcgtgtccatcacctcggagaccgccaaaagccacgcagctttgcgcgtgaagcggctcgtttccattgtattcctgagcttttcccgacctttatcggagcgtataccaaacgccaaaacgagcaaaacgatgcccaaaagccccgcaaacaccaaactgatgcgcccgatgagcgtcgccgcgagcacataggcataggaagatgaaagcaggctgcccgttaaattgtcgtacacgcgctcaaacatgggcagcacggcaaaaacgagcaccgccagcacgccgcacatcatcagcatcaaaacggccgggtatgtaagggtgctgcgcaaacggtcgtatagcgcgctttggcggtcatagtggtctgcaaggcggtcaagcgcttcgtccaatcggccggaaagctctgccgtgctaaaaacgctcaaggcgtattccgggaaaacgccggtcttttccgccgctgccgaaaacgtctcgcccgccgcaaccgaaaggctgatctcggtagaagcctgctgcaaggcggtgtccatgccgtcttcctcaaacagggaagaagcctccgaaagcgacgcgccggagcgcagcagcattgcaaggctgctgcaaaatacgctgagctgttcctgagtcaaaaatttttctgccatgttcctcgtcctttcgcttttcctttaataagtgaaccgcgttgtgtattccgaatcgttttgaatctccccggcgggcatgccgcctgcggcaaaggtgatgtccacccgctgccactcatccgcttttgcgcggatctccacggtgatccacccctcgctctccacataaaagctgttccacgcgtggtaggtctcctcacccacataacccgtgatgagcttgcacggaatgccctcgctgcgcagcatggcggcggcaaggcttgcataatcaaagcatatgcccttgccggtctttaaggtctcatccggggagggcaggtagccgttctgcacggtcgccgctttttccgtatcgtattggatattcttcaccatgtagtcatacacggcggcagcaatgtccgcatcggtggtgcagcttgcggccagctctttcacctttttgatgcaatcggagcttttgttgtaattcaccatctggttcgggcgcaggtacggctgaaattcatctttcagcgtcacgtcgcggtcttcgctcccgatgcatgcgtatttgctgtcgcccacctgctccatcaggcggaacgtgtatgtgccgtctcccatattgagcgggaaaaatgtcgcagtgccgtcgttcggcaagtcatagttatatttatcctcgccgcagacaatctgcatttttaatcgcgtatcgctctgcgcttttacgccgatgatgccgccttcaagctgggaaaggtcaatctctccgctgccgaacgcggtcgcttcatcttcgttgaagacggaatcccgaaaagcgggggcctcgtagggcgcggcgttgctgtccgtgacatcgcccgccgccggcctggcgtcgtttgatgccgtgccccgcgccgcacagccgcaaagcagcaaaataagcgccagcgtcgccgctaacagctgaattttttctttcatgccgcaccccctgtcttttctgtgtatactaaatattattttatcttgtttttgtcttatgcgcaagccctgtgtaaaaatcttccgtattgtccctaccgtcaatattttcaaaaaaacatcggaaactattgataatatataatattatagacataaatttcactaaaaatgtccaccgtgaacggcgacgtgctatatgacgagtacggcgaaatcacacagtgcagtttcaatgccgagttgctcgcgggcacgcccggtttacgcagcttgccgggcgttctttttgttttcccgaaattttggcgcaggagttttccacgaacacattgacaaaccgcgcaaaaaaacgtatgcttatatatagagttatatctaacttagaaaggagcgcttgcagatgacgtacaccattaaggaagcctcggacatcacgggcattccggcgaccacgctgcgctattacgataaagaaggcatcctgccgtttttggagcgaaaggaatccggccacagaatgttttccgaacaggatctttccatgcttcgcattatcgaatgtttaaaatgcacgggcatgtccattaaagatattcgccagtacgcggtgtgggcacaaatgggtgactccaccctggagcagcgctacaacctgtttcttgagcgccgcgaggccgttatggcacaaatcaaggagcttgaagatcagcttaaagtaatcgattataagtgcaaatactacgaggaagccattgccgccggtacggaagacattcacaagcacaaaacaggccactgttgcgacgatgaaaaagaaaacaaaaacgcgtaagttccgcaaaaaccaaaggcacggagttttaaagctccgtgcccttttgttgtataagtcataaccacacctaaaaggagtggttatgacttttgcttaatttccttattttagccctgcacagaccacgtgataccctgcggggtatccttcacaacgatatggcgtgcggcaagcgcatcgcgaatcgcgtcggcagttgcccagtcctttgcctttctggcttccgtgcgctttgcgatgagcgcttcgatctccgcggcttcctcggcggtcatgccctccggcacagcggacttctgcgcattctgctcctcgcgcagcgcctttgcagctttcagcaagccgagggacaacacttcgtcaaactccttgatgagcgcaagcttgtccgcgtcggaaagcttggctttcagtacgtcgtacagcgctgtgagtgccaaggacgtgttgaggtcgttttccagcgccgcacggaacgaggcacgcagcggctccatggcagcttcgtcgtgctctccctcatttttcagcgctgcaatgcgggaaacgagctttttgtacgccgtggcggtgttgtcaaggctctcaaacgagaacgtcagcggctttctgtaatgggactgtaagcagaacatgcggtatacaagcggcgcgtagcccttttcctcaagcagcgagaccgtgagaaaatcgccctttgatttgctcatcttgccgcgcgcgtccaaaaggtgcagcacgtggaaccagtatttgcaccacgggtggccgagatacgcttcgctctgtgcaatctcgtttgtgtggtgtgggaacgcgttatcgatgccgccgcagtgaatgtcgaggtattcgccgaggtacttgatgctgatgccgctgcactcgatgtgccagcccgggtagcccacgccccacggggaatcccacttgagctcctggtcgtcaaacttcgactttgtaaaccacagtacgaagtcgctcttggagcgcttgttttcgtcctcttccacgctgtcgcgcacgcctacggcgaggctctcttcctccatgttgccgaaaacataatagttttcgagcttggaggtatcaaaatagacgttgccgcccgcgatatacgcatatcccttttcaaggagcacctctaccatgtggatgaacgtatcgatgcagctcgtcgccggaacgacaatctccgggcgcttgatgccaagcttttcgcagtcactgaaaaatgcgtcggtatagaactgcgcaatctgcatgacggtcttgtgctcgcggcgcgcgcccttgagcatcttgtcttcgccggtatcggcatcgctggaaaggtggccgacgtccgtgatgttcatggcgcgggtcacgtcatagccgaggtagcgcaaggctttttccagcatatcctccatgatgtacgagcgcaggttgccgatgtgcgcatagtggtacacggttgggccgcaggtgtacattttgactttgccggcttcgtgcggaataaattcttcttttttctgtgttcttgtgttatagagctgcatacaggtgcttcctttctgcttattcttccttattcttctccgctttctgtgcggtcagcttgcttttttctctgcggcagctgttcagctcgccgtgcaggcgctcaatttcaagccgcatgcggcacatttcctgcgccaccgggtcggccacgtggatctgatccagcgtgctgttgtccatcacacgcttgccgcccacgcgcacgatgcgcgccggtacaccgaccgccgttgcgttatcgggcacggcatccagcaccacggcacccgccgccacacgggcgttatcacccacgcggaacggccccagcacctttgcgcccgcaccgacaagcacgtcatttccaagcgtcgggtgacgcttgccctggtctttgcccgtgccgccgagcgtcacaccctgatacagcgtgcagttgtcaccgataacggtggtttcgccgatgacgacacccataccgtggtcgatgaacagatttttgccgatcgtcgcgcccgggtgaatctctatacccgttttgcggcgcgcgcgctgcgagatatagcgcgcgataaatttcatattatggcggaaaaaccagtttgccttgcggtaagaccgcaccgctttgaagccggaatacagaaaataaacctccgcacggctgcgggcggcagggtcgcgcgccatcacggcgtcaagctccgcctttaatttagaaaacatgacgtaaatctctccttaaaaacaaaaagccccgagcgcacaacataggcgctcgggggcgaaatgtaccaaaacattcatgatacaataaatccgcggttccactccggtttatcactcaaacggcgtaacgtgccgtatccgtatgcggctcactttcgctcaccgcatccgctcgcgaatgcacttcgcccggctcttttctgcggcggctctcagcccatgacctccgctctctatcgactgcccccggggtactcgttcggtctcagcgtttgctttatgacagtattttaacacagcccctttaaaaacgcaagcccaaagatcacctctccgcgccattttatgcggcttttttcttttggttctttctatttgcctattttaaatgaattaaatttaaaattatttattttgtatattgacatgtattactcatctgtgataatgtatatttaacaaaaaaaacaatcggatgtgataaatatgtggttcttatgatttaattcatcttactgaattcaatatttaaatacaggggaggaacaccatgtctaagcttatccagaagcgcaagctttgtatttcaatgttatcgatacttttagtcttgctttttcaaattcaaaactttacggtttctgctcatgagattttctatgatggctcaactggtatagccttaaaatggtacaatgtaacaaatcgcgtagcgtatataaatatcaatggtgataaattagacagtaactattcttctcactattctactatacgttatgcttggtctaacgcttctgcgcgagtttccatcacccagtcgaatttttcatcttctaatgttgatttaggaacagcaaccagttccgcatggtctgaaatcgttggtgaatggaatgttaattcagttcttgctatttgccaatctacttccaccgatggaattttacttgacacccttgcccatgcaaaaagttcttcgcgaaaaattaaatacgcaagtattctttttaatccaagcgttttagtatacgatagcaccacccacagaagatttactatggttcatgaaattggtcatgcacttggattaggtcaccctaatactaattataatgttaccagtgccgcatctgttatgcgacaaggcactagagagacctactacactccacaaaatcatgatataactgatctaaacaataagtattgaaaggggaattaacagttatgacgttgtcgacgattgttaaaagcaaaacttataaaataattctaattgtaatttcacttttcttattgctttctacatgtgttattctcgtcttatctaacactaaagccgagcaactttcgccagaacaaatctcaattttacgaagccaataccccgtttgcggaactgaaacgccgtacatgttatctatgactaagctaaccttagaagattgcactaatatagcggatacattcctttatggtgaaatcgaaggcgatatacagtattattctaagaacatttcaactggtgatattgagcttgatcaaaaacgcgcagaaaatggtatttcaaatacctatgatttttacgagtacaccctcgtgatcttgtccgatacttcggaaaaatacgagccgggcgaccgtgtgacgatcgccgcgaatgttttattcaaagattataacccgcagtttcaagacggtatgcgcatcgtgacgccgatccgcgcagatcaaaacaatacttcccgcacatattttggcacagagggcacatattacgtcacgccggacggctacgcaatctccgcctttgaagaagatgccgcaagctatgctgccgcgccaagtggtctacgcgtagaaactcttttggaaaagctgaaagagatgcagaaataaacacacaaaaacagggtacgcacttttttacagtgcataccctgtttattttagctgtgatttaaaaattagagctgctcgtcgatgatctttgccttttcaagcgcacgcttctggagcagtgcgtcgatcttggcgtgcgggtcaagcagggagctgatggaagcgtcgtggttcaaagcggagatgaagtaagcgatgtacttcgaaacgtcgacttcatggaaccacgggcggttcttcagttccgggttaaggtacgtcaggttgctgccgaagatgccgtcgatgagaccctcttcatacgctttatcgaactttgcgaggccgttcgtgaagatggcatacgtgccgtaagcgaagaagcggcgtgccttgcgggccttgacgttctctgcgatgtcgagcacggactcgccggaggagatgatgtcatcggcaacgaacacgtccttgccctcgaccggggtaccgagatactcatgtgcgacgatcgggttgcggccgtctacaatgcgggaataatcgcggcgcttgtagaacatgcccatgtccacaccgagcacggaagcatagtacatgttgcggttcaacgcaccttcgtccgggctgacgatcatgaagtctttcttatcggtggaaagatccgggaagtccttgaagagcttctttaaaacctgataagtcggcatcaggttatcgaagcccataaccggcacagcgttctgcacgcgcgggtcatgtgcgtcgaaagtcaaaacgttggaaacgcccatctgctgaagctcctgcagcatgtatgcgcagtccaaagactcgcggtagctgcggcggtgctgacggccgccgtaaagcagcggcatcacaacgttaacgcggtgtgccttaccacttgctgcctgaatgagacgcttcaaatcctgataatggtcatccggggacatgtggttctggttgccgaagtagttgtaggtcaggctgtaattgcctacgtctacaacaaagaacaggtcatagccgcgcacggtcgacttgataagacccttgctgtcgccggaagagaaacgcgggcagctgttttcgatgatgaacgtgtccacatccataccggcacgctttgcccaacgcaccagatgggcctcaaccttttcggaaagctcacgcgcaccggcaagcggtacgatgccaagcggtgctacgcgattctctgcactgaaaaacgtctgtgattccattgccatttgattactccttcaaactgcatattccgttatttgcctgtccgttttacacgaacaatgtcggctcttgtctatttcaatatagcacaaaatagcgagaatttccacagcaaatacgcaaaatattaaacttttgttaaatccgataagagggcaatgccaaacggagcgagtttgattgaatttaccgtttgatctgtaccgtacaacttgtagtcgcgcggcaattccacggtttttccgctttccgtgtagttttctacaaaaatgatattctccttttcgccgtggcggatgtgtgccgttacgccgtgcggcagagcgcaatcgagcgctttttcaatgtgcagcgtctcaatcatttcgccgtacagtacagaaagcatatcgctgccggtacgggccgcaatgtaatacgcctctcccttgccgaacttgtttttcgtcagcgccgcttcgcctgcgtagaaatccttttcatatgtgccgagcacctccgccgtcagcgggtggatacgtgcacaaagctctatagcatcgtaacggctgccgttaaacgcaatgccgtttttcatgccgtccggcaggctgtcgatttcttcgttccacacgccgaacacgtccatcatgtcgccggggaggccgcccattttgcacaggtcagtatcgtccacgatgccgctccagtacgttgtaacgagcgtgccgccgttttcgacgaacttgcgcatcttcttttcaaagcctgcgcggtacatatagagcatcggcgcaatgacaagcttatatttcgagatatcgccgtccatatcgacgatgtccacctgcacgcccttatcccagaacggacggtagtgcgtcaagagcgtctctacatatttttcgtctttatccttgttgcgcgggcccgcggcggcatccagcgcccagcggttttccacgtcgtacacgatagcgacctgcggcttgacttcggtgccgtatacgtcgccgcgctcgttcatgctcttaagctcagcgccgacggactgcacatccttaaacacacgggtgttctcgttcgtaacggagtcaaacacgccgccatggctgacatggtcaacgaccgcaccgtggaacttttcgcaggagccgcggctttttctgaactggaaatactgcacagaatttgagccgtgtgcaaccgcctgcatggaggaaagcaggtgcatgcccgggcgcttcagcatactgatgggcgtccagttcgtcatgctcggcgtgctttccatcaaaaggaagttttcgtgcttgatcgaacgcatcacgtcgtgcgtcatcgcggaagagaccgcaatctctacgttgtcggtcgtatgccactgcgggtagttgtcccaggaaacaacatcgagctccgggccgaacttaaagtaatcgaggccgtcgtagaagcccatcaggttcgccgtcaccgggatatccgggtttacttcctttacggtgtcgcgctccattttcatgaaatcgacggtctggtacgtgacaaagcgcttccaatcgagcgtcagaccgtgcacgttcatttcgccgttcggctgcggcgcgtgaatctgatcccagctcgtatacgtgtggctccagaagtccgtccaccacgcgtggttcaggtcgtcgagcgtcttatacttctttttcagccaatcgcggaacgcctgttggcacagcgggcagtagcactcgccgccgtactcgttagaaaggtgccacaaaatgacgcccgggtggtttgcaaagcgctttgcaaggcgcttatccatctcgcgggtcttctctctgtacacgggggatgtatagcagtggttatggcgtgcgccggaaaggtcgcgcacaccattattctgcacacggcgaatctcctcatacttttcgctcatccaaagcggctttgcaccggacggtgtggccaacacggtataaatgccgtttttgtagagattgtcgatgatcttctccagccagtcgaagtcgtattctccctcattcggctccagatgtgcccaggagaaaataccgaccgacacgcagttgatatccgctttcttcatcagctccacgtcctgcttgagaatctcggggtagcgcagccactgttcgggattataatcgccgccatgcagcagcttcggaaatttcggtgtaaggggtctcataataaaatacctccgtcagcgcggcttcccgcgcgtaatctacacccagtatacagattgtacggacaaacttcaagagtgagtttcacattcttcattctttagtctttgccgcgttcttatgcgcatgtaataaagaaaagcgcacagattttgttttctgcgcgctttttagcttcatatttttctgaaaggcttcttttattcgcccgctttactttggcttgtgtcaagccctctcgtcagcttatgcattctcacaaaatacgttgtgacaagcaaaatagccgcaccggcccaagcagtgatctccgcatagaaaataccctcctgcccgataataagcggcagaaacaacgccacgccaatacgcatcaagaattccatgatgcccgaagccatcggcatgatggtatcgccaagccccatcagcgcggagcggtaaatgtgcagcatatagaggatagacagacaaatactcatgatattaagatagtgtattgccacctgcgacgagatcgacacttcctccgccgtgccggaaataaacagtgcgatgccgtattttccgaaaatcagcacaaaaaccgtaatgacgaccgaggtcagcaaagcgatccacgttgcggagtgcataccctttttcacgcggtctaaaagccccgcgccgagattctgcccgacatacgtcgtcacggcgtagccgaacgaaacggcggcaatctccaaaataccgtacagcttattcgttgccgtaaagcccgccacgaacagcgtgccgtagcggttgacgaccgactgcaccaccatgccgcccacggcgatgataacattctgtgcggcgaccggcgtaccgagccccaaaaggcgctttgctatttccggattgagccggaaatactcttttttcaggtggatgaccttcacgtgcagcacagcgcgcaaacagtaaagcgctgcaaaaagctgtgcgatgaccgttgcaacgaccgcacccgcaatgccccagtggaacaccataacaaacaacagatcaagcccgatattcagaatagatgcaatgaccatggcatacagcggcgttttgctgtcgccgagcgcacgcaggatgcttgcaagcacgttatacgccatgatgatgggtatacccgcaaacatgatgcgcaggtatgtgaacgcgccgccgatgatctcctccggcgtgttcatggcgcgcagcacgggtgccatggcgacttggctcagaatgacggtcaagattgaaatgaccgccgaaagcgagatcgtcgcgccgatggaacggttaagaccctcgtggtcttccgcgccgaaacgctgcgccatgtaaatggaaaagccctgcgcaaagccttgaataagccccagcacgagccagttcagccagtccgccgcaccgagcgccgccagcgcgtttacgccgagcgcctgccccacaatggcggtatccaccaccgtgtagaactgctgaaacacgttgcccagcatcagcggtatcgcaaaggtgaagatcagctttgcaggactgccttttgtcatattttgaatacgttctgtttttgccataaacccctcatgatttcgccgaaagtttttccggcaatttatgaatacgaatgtaatacgtcacgcacagcagtgccgccgcgccgaaccacgcggagacctctgcaatgcagatggaaagaaagcccagattgaacactttagagagcgcgagcacaacggaaatgcgcagaattagctccagcgcgccggagagcatcggcaccaccgtgtcgccgagactttgcagggaaaagcggtagacgaacagcaaacccagcacccacatcatcgcaccgcaacacagcaaatacggatacgaagcttcgatgaccgcctgctccacgccggagacgaacaccgccgtcagctggcggccgaacagaatcattgtgccgccgatgaagaaatcgacgatgagcaccatcaaaatgccgcggcgcacgccaaccttaatgcggtcaacgcgtcccgcgccgaggttctgcccgacatacgtgccaagggataacccgatgatgttgcacggctgttccgcaagaccgaagattttcgagcccgccgtatatgccgccacaatcgtagaacctaaactattcacaatgccctgcaagatcataccgccgatcgccgtaatggaattcataattccgatcggcaaaccaagcttcaataagcccaaaataatagacttatccatgcgcttttcgccggctttaaaccgcaaaaccggcatacggcacaacacgaaaagacacatcaggccggaaagcagctgtgccaaaacggtcgcccacgcagcgccggccacaccccatttaaaaaccatgacaaacagaatgtccagcccgatgttcactgccgagctgatgagaatgataatgagcggcgacatgctgtcgccgagcgctcgaagaatactcgaaagcgtattgtaaaacaccgtcgtgagaataccaatgaaaataatgcggatgtacaaaagtgcgtcgtcaaaaatatcggtcggcgtacccatcagtgtcatgagcgggcgcgagaaaatgagacttaacgccgtgatgaccacagcgctcataaagccgaggtaacccgcgttcatcaccgtgcgacgcatgtcgctttcgtcgcctgcgccgaagcgttgcgaaatcaaaatggaatacccgtgcgtcaaaccgttgatgaaaccaaaaataaagaaatgtaccgaacccgtggaacccgccgccgcaagcgcattgacgcctacaccgcggccgagcaccatagcatccgccacagagtataactgctgaaacacattggcaacaagcaaaggcagtgcaaatgccaacaaaagctttaccgggctgcccttcgtcatattgcgaaccacaaaatcactccctccaaaagacactttaattaccattatatcggataaaatgctgcaattcaatgcctgtatgtcgttttcgaggggtgtaaacgccgaattttcctattcttttttggctaatttggcgctatttcggcttcagcaacaagccgtgtaaaaaagcagcgccatgcaaaagccgcacagcgccgcgtgaattttgttcaatcaaacgatgtaatcgaccgcaaccgccttttcgcgaactgtcgcaacataggtcttcaccgtgttgcagtggtacgggtctttctggtattcttcgagcgcctcggggctctcgagcgtaacggtcaggcaaacgtcaaaggagcgctcggagtggaggaaatccgcaccggcttccacgtcaagtgcctgcggcacgcggcccttcatcgtcataaaaagatcgcgcagcttttcgcactgctctttggaattgtccttgagcttgatcattaaaacatgctttaccatttgaaaaacttcctttcggataaaattattgcatagctaaagaaaaccatggttaaaagttttgctcaagcttttttcaaaagcttgcaggttcttagggcagcgccctacgtcgctttccgcagaaagcgaaatctttttgcgttcgcaaagtcaggaagggaggacgaaacttccggtggacgtttcgtccgagggaaaccctactaaggggtttccctatgaacttgtaacacaagttcataaaaatcgaacccagtcttccccgaaaggcggccaaagccgcctttaaaaaatcgacttattctatctaacccccgaaaccgccctgtcgagcgcgcccaagtccttgtgaatccgcacatcgcgcagaccggcggcttcaaacagcacctttaccgcctgcccctgcgtctcaccgatttccacggcaagcacgccgttcgggtgcaattttttcgcccaaatatcgcagatcgcgcggtagaagatgaggccgtccgcgccgccgtccagcgccgttttcggctctttctgcacttcgcgctgcaaaagcggcagctcgcttgtctcaatatacggcgggttcgacgcgatgaaatcgaacccatccggcagcgtctccgcaaaagctttatctaacatgtcgccctttaccgccgtcaccggcagctccgggtaacgcgccaaattctcgtttaaatagttgaatgcgccgtcgtacagctccacttccgtcacttcggcgtgtgcttccttcgcgatggaaagccccacagcacccgtgccggcgcaaaggtcaagccccttcggcaaattcacggttttcgacaaacgcttgcacactgcttccaccaaaacagcggtgtcctcgcgcggaatcagcacgccctctccgcaggaaagcgtcaggttcataaagtcccactcgccaagcagatattgcagcggctcgcccgttttgcgcttttcgagcgcggaaagcaccgcttgctccgcttcagactccgccggcttatcgccgtgcagcaataactctgtgcggttcgcgccgcagaaatgctccaaaaggcacgcggcttcaaacgtcgggtcttccgtgacgggttcaagcgccgttttcgctgcgcggtacagctcgctcagcgtcatcggataatatcctcgccgttttccgggataaccgctttcatcgccgcaatagcggcttccatcatcttgttggtcggctcttttacggtcaaacgctgaaaccacaggcccggcgccgcaatgatgcgcgtcagcacgttatcgtacttgccgcaaagcttgataagctcataaccgatgctgacaacgatcggcaggcacaagagcttacagaacgtgcgcaggaacggattggaaaacggaatgaaaaagccgatgatgatgccgagcaaaagcattaagatcataaagctggagccacagcgcgggtggaagcgcttttgcttccgcacattttccacggtgagcggcaggtcgttttcatagcagaaaatcgtcttgtgctccgcgccgtggtagcggaatgtgcggtcaatctccggcattttagagatgacaacaatgtacagtacaaagatgacgatacgtaaaaggccctcaaacaccgaacgccaaccactgatgccgtcgcccgtgagcatcatcagcccgttaaagagcaccgccggcaaaaagaagaacagcagcaccgcaagcgccacgcccagcacaccgcccacggcgacgaccgcattcatcaccttgtctccgaatttcttttcgagccacttttcaaatttcgagggctcttcctcttcctcgccgcccactttatccgccgaaagcgtcagcgccttcataccgaggcgcagggtatccaccatagagaacacgccgcgtataaacggctttttcaaaatggggtatttttcgcgcagcgacggcgtggaaacctcctccgttgtaatatttccggcttcgtcacaaaaagccgctacgtttttcttcgggccaaccatcaaaatgccctcaagcaaggcctgcccgccgatagatgttacgcgttttgccattctttctccttttgcttataaacaatatttaatcctgttttctctccacgacctgcacctgcgcggtggcggtgggaatctgcgttgtattggaaagctcgggattcatctcaagctttttcatggtcggtatcgtgatgatgaccgtggtgcccatgccttcttcgctgtcaacatcaagcgagccggagtgcagctccatgatctcatttgcgacggcgaggccaatgccgttgccgcgcacattttggtttgctttgtagaacttctttttgacgtttggcagatgctccgccgggatgccgcagccactgtccttgatgatgacgcggataaacccgtcgtcctcatacgcggaaacgcgcaccgtaccaccgggattcgtgtatttcaaagcgttgtcgatgacgttgatgaacacctgccgcaggcgattcacatcgcccaaaatcggcgaaagcatcgtgtcctcctcatcgtaaatgaggtttttatgctccgttcgcgcacggtcggtgaacatgtacacggcctcatccagctccgccaaaagatcgatcttcttgaggatcagccgcattctgccgctttgcatgcgggaaaaatccagaagctcctccaccatgccggaaagacgttctgcctcgcgcacgatgacgttcatgcccttatcatacgtttcgcggccgatgccgcctgtttgcagcgtttccgcccaacccttaatagccgtcagcggcgtgcgcagctcgtgcgaaacagaggaaatgaagtcgtttttcattttttctgctgtgccaagctctgccgccatgtcgttgatggagtcgcacagtgcgccgagctcgtcgtccttctctttcttgacgcgcacgtcaaaatcgccctttgcaattttttccgccgtagcattgagttcccgaataggcgtgataatagaccgcacaaaatagatgcccgaaagcgtgacgagcaccaaaatgagcacaccgatgccgatcaaaaccagcacgacatacgtaatctgccggtctgcgcgctccatagagacgatgtatcgcaccgcgccgagcaccgcgccgtttgcgccgcgcgccacgcgcgagacggccatgaccttctcgccgctcgcgagcttgccgatccaatagccgtacccattttcgctgtgcaaggcactttcaaaatcgggcttgctctggttttggtccggcgcaaagccggaggaggtagacaaaatgctgcccgaacgcgagaccgccatgacctccatgaggtctttatccgggaaattttcggtgtagcttctggctgcagcgttaaactcgcttacggttttcatgctgccggaaagcacggtgggcagctcgtcgctgcggccgatgagcgtcatttgtatgccgttataggcatagctctgcacaacgaaagaaagcgccgcaatacaggctgtaaataataaaatcatcacaccgaggctgttaaacagccagcgtcttgcgataccttttttgaacacgcgctttcctcctttctgtgcttctttttgtagttaccagtatttttaaatgacttgccctgcaagtcatcagaaaacccatgcaactgggttttctgcggttcaacagtccaccggactgttgaacctactttcctagttttttattaggcaaaaagatttcgtcgtctgcggacgacacctcagggccttgccccgagcccccataaactttctgaagaaagtttaatcaaagacttcattcgtttgctttcacgcaaccttttgattacttatcccaccgatagccgatgccccacacggtgacaacatgtctcgggttcgagggctcgtcttcgatcttcattctcaatctgcgaatattcacgtctacgattttttcctcaccgacatatccgctgccccagacgtgctttagaatttcggagcgttttaacgccttaccggcatttgagatgaagtattccataatctgaaactccacctgtgtcagctccacggggttgccgtcttttgtgaatgagcggttgcgcaggttcagcacgaagcggccggagcgcagctcttcggagaaattcggctctgcggctctcgtaaactgtgccacacggcggtaaacggcgtctacgcgcgccacgagttctgaggggctgaacggcttcgtcacataatcgtccgcgcccatcatcaggcccgtcaccttgtccatttcctgcgttttcgccgtcagcatgatgatgccgatggtcgcgtttttctgtcttaattccttacatacggcaagtccgtccagactgccgggcatcatgatgtccagcacggccacgtcaaaatcgccgccggcctgctcgtacacgcgcaaagcttcctcaccgcttgcggcttccacgcagtcgtaccccgcgcgctttaaattgatgaccacaaactcgcggatattctgctcgtcctctgccaccaatatctttttcatgttcgtttcccctttctgtcccccattttcagtctatatttattccagcacttcaaatccgctttgcagcgttttttcgtcgctttccgccatggaatcgtccaaaatgcgcagcacatacacgcgtccggcggagctgctcaacagaatatcttcgtcattctgttctttttccgcccagtcttcctccgtatatacccgaatggagaacttgtcctcccggccgaggtaattgccgttaaagccgatctgtgtatacgtaaagaatgtcgctgtgcgggtcacggtgtcattttggcagccgtagttatcctcgctgctcggcaaaaacaggttgtagttttccgctgtattcaaaatactcgtgcacaccggcgtcaacgtgttgtcctgtaagctatacgtgttccacgtgatgacatacccggtggaatccgccgtcgtttcgctgccgtttatcgtcaactccgccgttggaatctccaaaatgccgtctttattcacatcgcgcgagaccgctgcggccgccgttggccgatccgtcgcgttttcttcgttcgacagcggcgaaatgagtctgtccgacgcttcgtcatacccgatgacctgcgtcagcatgcgcccgtccgctttcacgccgtccagcaccgctgcgcgccgccaagaatttacctgcgaaaagcttacggaggtgtaacgcgtcaccgccgcatcgagcggcacggttttggagacatacggctggtcgccgtcaaagcggtataacccgccaagcgccataatctcttctccgctcgtctgcgccgcctgcaaaacgaacagctcttttatattgtcgctgtcaaaatctgtcagcagaatttcgctgtatgagaccgttgtcatggagaattcgcggatcgtgtctccgtccacataataaaccgaaacgcttgccgtcgccgtgagcggatctccccagcccacgatgatctcgtccataccgtcgcccgtcaggtcaccgaaaaacaccttgtccacctgcgttgccgccgaggtaaaccgcgccatagagttccaaacgccgtccgtgtttttcttaaaaaattccagccgcgtgccgcccgcgtcgccgtttgcacagaaactcacgacctccgaagtgccgcacccgtctaaatcgcgcgagatgatcgccgagcggtaatcaccgcatttcgggtaaacaagcgtcacgtcacccacgccgccgcccatcagggcatatatcgcttctctgtctgccgtcgtctttggcggagacatcagcgcttgcgcatcaagacccgtcagctcgctgcaccccgaaaaagaaagcgccaaaagcacggcgagcaccgctgcaaaaagttttttcagttttccgcgcatcgccgtcacctcctgcgcaaatttacaatatcggtataagtatagcatatcccccgcaccgccgcaagcagtcaggggcgctttggcgtcatataaaaattaaatttctgtgacagcattgagaaaccggcgcgtgcgtggtaaaatggagaaaatatctcgaaaggattccgcatgaaacaaacaatgcacaatacccgcgtgcgatgggtgctcggcattctcattgcactcacgcttgcgttcatctggagcaactccatgcagagccgcgcggtctccggcggcatgagcggctccttaaaaacgtggctcgagcagcttctgcacacagaaatcagcgaatttttgctgcgcaaggcggcgcatttttcggaatacggccttctgggtgtggaattttcgcttctgctcggcttacagcacgataaaaacggcaaaaatctccagtgtgggcgcaatcttctcgactttccgctcatcggcatgctgtgcgccgtcacggacgagaccattcaaattttctccggccgcggttcgcttgtttccgatgtgtggatcgacaccgccggcttttcgaccggattctttttgaccgttctgctctttctttttatcaatcactgtaaaaaaagccgggtaaccggcaaccggaaaggataaataccatgaaacagcatattttaaagaagattcctctcttcgtcaccgtgtccgttctgctcgcgtgcatcgtgttttccggctgcgcgggccgcaccgtcatcacagatgcgcaattcaagtccgcctgcgaagctgccgactgcgaagtaacggacgtttccgaccagtttgacagcagcgtcatcacaaaagcgctgaccgtttcgggtgatgattactccttaggctttttcacattcgcttccacggacagtgccaaaacgaactacgcgcagatgctttcaagcgtcaggacctccgagggcaaggcggtcgattccagcgaatacaaccgctacacgtataaaggcgacgacctcacaacggtactctaccgcaacggcaccacgattcttttcgccaccggcgcggataaggacactgtaaataaagtcgtaacagcgttgggactttaacttttaaaggctcgtcggcaaaaccgacgagcctttaaaaatacctggtcatgcgggcagcggcgttcgggatgaatgtttccgcccgctctgctatataagccgccgttagcgcacccgcgccgacgtactccccatactccgtaaacaggctgcgcgccgcgatgcgctctgaaaaccgcaccgtcacgcacaggaaaaaccggctgccgatccgccccagtgccgaagaaagaacatggagcgtgtgcacggcacgctccaccgcatccatcaaatgccccacggtctcaaagcaaaacgtcagcggcacgggcggcgaaacgatacgaatgccaccaccccctttccgttcccaaggcacacccgcaggtgtatcttaaaccagtttacgtcaaaggcaggtacaccgtgccgattttttctttgaaaccttgacattttctttttacgttctgatcattaccaaagttagttatgatctgacatcggtgaaacgctgaaccggccgcgccccggtgtgacccgtaccgtaaaggaaatagagcaaaaagactacctacaaaagaccgcttccgaggaagacggtcgcgtgacctacatttccgcaacgaaagcttcagcggtaatgtaaccggcacgctaaacaccggcaaagctttccgtgctcaaagcagaagcggcaaagtggatgttccgttcgataccggcgaaggcacatgcaaagtcagcacactcagcggcagtatccgcattaaaattgcaaaataacgtaaaaaatctctctcggctgcgccgagagagattttcaatttcgaaccttattttactttatttctgaacttcggtaccaacacggtggcgagcacccagaacaactcgtagataacgagcgcaaatgcggaaatctgctccacgcccgcaacgaatgtgaggaacgccacaagcacaaagccaatgacgaccgccgcgttctgcatggcgacgatgaagctgatgttcttcttttcatcaatgcacgtggaaacaaggctcatcatggattccacacgaccctttgtggcggcataggcgtccacgcggtccgcagtgtcgttcacaaggtggtctgccgggccgtcttggcctgcgccgatgacattcaccgccgtggcgtcaatgccgaacaggcgcgaaatgaactgcggcgtaaggttcgggtctgccgaacgcagaatgagcgaaacgccgttcatttccatgttctgcagctccgctttcttctttcggtctgcgttataggtcaggatgaacatggcgtaaagctcgccgcccattgcaacgtacaagatctgtcggctgcccgtcgtgtactgactctccacattttgctccggcgcttccacaccgtgcgcagtcaaaagcgtacgggagccgatgagcacctctttgccgtccaccgtgcccacaacgccgtttccggcctcaaatgcggccttttcgacctccggaagctcgccctcatgctcgctgaacacctgctcgaacacgccgcaaagcgggccgccgagctgctgcaccaacgtgccggcagccaaaacggcttcttcaaggccctcctgcttaaacggcttcaccccgttcaaaacgaccgtgccgcgcgggaaaagctctgtggaatcaaccagaacggcatttacggcgctcatgcgcttgataccttcatagccggagaccatcgcgccgcggcggcgcaggcggtgggaaagacggctcaccggcaggtttacggccagcatattcatcaccgctacacacacgcagcaggaagccgccaaagccgtaatggcaagggacgcatctttcgtgatgacaagcgccaccacgcacagaagcagcgaggagatgaggcccaccggcgccaaaacctgcgaagaggtctctgccgggtccggctcataggaaatttgtaagaagcgctttaagaagcccgctttctgctgatatgcgattgcaggctgcgaaatgacggaggaacccgccatttttaaagacgtgttgtaatcgtcaaatacgcgcaccgcatatttctgctcgcgggaagacacaaagcggaaattcgagtggatgcggcgcagcatcgtcagcttgccgacggtattcaggaacagaatacccgccgcaataccggcgtaaaggtggattttacccatgctgagcgcagccggcgcaaacagcgtgcagagcgtctgcacaaaaaccgccacacaagctaccgcagcggcagaatccgaattcgcgcggaactcaaacagtgccttcagaccgtttaaaatcgttttcgcgcagaagccgatggccactagcagcagcacaagcgataagatggtgtagcccactgcaccggcggtctccgtgttattggcattgaagccggattccgcaatgagcgacgccaaaatgagcactgccgtgctcacgcccgttgcaagcatgcggattgtcagttcgcgcatcgtcgtgcgcaggtcgtgcgccacgctctttgcgtctgccgggccggtgtaatcgtcgatgagctcgtcgctgttttcggcggcttccgtgttttcgggcgcttcgtccggcttttccgcaaagcgaattttaaagcggtgcgcaccggccgcactgacgttctcgtcgtcggaatacacgcgtgcttcgctcagcaatgcactttgcaaaacatccgcgttgatgatgtgcaccggcaagtcgcgctttctgtactgcgttacgtccgttaccggcacggagatcttctgctgcgcaggctctgccgcttcttcgccggcgttctcggcgctttccgcagcctgcacattttccgctttcggcgcttgtgcttcgggcagctgctcgccggaagcaatgtccatgccttcttccgcctgcggctcttcctccggctccgggccattgcttgaaatatccttaaacgccatctcgggcgcgtcactttcttccgttttcggcgctgccgcagcctgctgctcggcattttgcacctgtgcagcctgctttgccgcgttttccgcctgcacagattccagaatgcggcgcacggaatcctcgctcacctccggcaccacctttgcctgctgcaaaccaaacgtctcattttcaaggtcaagcttaatctccatcgtgtgcgtctgcgcgtcctgcagcatcgccgtctggaaattctgcaccttgtccttcgtctttttgttttccggcaccacagcgttcgggtcattcatcgcaacggagaccggcaccggggccacaatgcccagctcgtcctccacagcggaaagatccacaccggccgtctctacggcctcggccacacgacggcgacgctctttctgcaggcgctcaaagtcctttgccacttcgtcgtcaagctccgcggtgttctcgtcaaacagcttgcgatagccctcgtcctgcgtggaaatctcccctgtggcatcaaacccgcgggtgtattcgtcaatcggttttaactggatgccgtagtacatgtcttcggcttcgttaaaaacctctttctgcttcttttcacggcggcgcgcccaaaaaccttttttctctttcttctcttttttgttcttctttttcttttcgggctcttcttcctcctcgtaggtatcccacggggagtcttcttgcacctccaccggctgcggttccgcttccggcgcgggctgtgctacctctgccgaggcttcctctacgggctgctccgtttcaggctccgtcacagcgtcgggtttttccgtcaccctgggcgttgttttttccgactcttccggcgcgccgttggctttcgccttgcgctccgcttccaatatctcgtccaccgagaatttgctctcatcgttcatgattttgggtcctttctttttcgcctcagcccttggccttgatgcccgcgcgctgccgcgcaatctcatagcaaagcacgccgcaggccaccgaagcgttcagcgaattgattctgcccttcatcggcagagaaacgataaaatccgatttttctttcacaagtctggacacgccgaagccttcggagccgacaacaagtgctgccgggccggagaaatcggtttggcaccaatccgtgccgtccatatccgcggcgtatacccaaacgccgcgcgctttgatctcctcaagaaataccgcaatattcgtcacacgcgccacggggacgtattccaccgcgcccgcagaagccttgccgaccgccgccgtaaggccaacgctgcggcgcttcgggatgacaacaccgtgtgcgcccgcgcattccgccgttctgagaatcgcaccgaggttatgcgggtccgcaatctcgtcgcacacaaggataaacggcggctcgtttcggctttccgccagcgcaaaaatatcctccacctcggagaacgcgtgcaccgccgccatggcgatgatgccctggtggttttcgccgccgcacatgccgtccagcttacgggaatccacttcctttaccgggatgcccgcctgctttgccatgcggagaatggacgataccgaaccgtttttctccccgcgccgcacaaggatgctgtcgatgggtctgcccgctttaagcgcctccgtaacggcattgcgccctgctatgacatctctttctctctcgttttccatgaacaaacctattcctttccgcggcttcagaacacgtctgcggccgaaattcgcaatactatcgcagtatatagtagattatagcatacttatatttgccattgcaaccgaaacgcgcaatttagcgcggtttttgcaggcggtttttgcgcctaaaaccgccgtgtttttgggcagttttttcgccgcgctcttttcgtcattttgacggtgcttttgcgtgttcattttgttcggcataattattcattcgggctgcatatcttctcacatcttgctgtatatgagccggcctttacatttatacaatctgtaatatgcacggcagaagtatacacacagcgagctttccacagcgttttccgtttaagctgtggaaaactctgtggaaagtgttaaaaacccgctttcggtgctctttttactttccacagcttttcacaatgtaaaatattatgtaaactattccgtcgaaaataccactttttaccgttttttcacagaatactcactataaaccgtgtgtaaaatttgcgtgaaaagccttgtgtttgcccaaaaaaatgtccctatatatggtgtttttgcgaaaaacagcgttttaacctcaaattagaactatttaggcgaaatcctaggcggcggaattttccgtttaagcacattttgtgaaaaaaagcaaggcggcaggctttacacggttgttttttcacctaaaatcgtgtaaaatgaaaatagcgagcagaaagacaccggaaagctgcgcactttttagacgtgtcccacaaaaaagcggggccgcacaaaccgtaagccacggcaattaaaacaaaagacatttttcggataaacatacactgtatacaactataagaaaagaggaacccaaaatgcgtgaagacatttgctctataccgatcagtgaaattttcgagccgaaggacggctgcccgttctgccgcatgcgcgacatgctcgaggaccgcatggccacctacattaccggcgcggccatgatggagcccgacgtgcgcgtggaaacgaaccgtctcggcttctgccaccaacattttgagcagatcttacagcgcggcagccgcctgtccgtcgcccttattctcgaaagtctcttagacgaagccggcaaagatatcctgcccgaagacgacaagctcgcgccgaaaaaaattctcgccgctgcagatcgccgtgcgcacagctgctttgtctgcgaaaacgttgagaaaaacatgcagcacctcagcgccacggttatcaagctctggcagagtgagccggagttccgcacactgtacagcgagcagacgcacatctgtctgccgcattacagcttcattttggctgctgcgcagaaaatgccgcgtaaaaactttcagccgtttgcggcagaaaccaagcgccttgcgaaaaactatctcgataccgtcaaggccgataccacccatttctgccgcatgttcgattaccgcaatgcgggcggcgactggggcaattcccgcgatgccattgagcgcgccatcacgtatctgacgagccgagagcccaccgtcaccaccaaaacggaaggcaaaaaccgttgatgcgcttcaccccgcccgatggcgttttaaacctcgcccaaacgctcgactgcgggcagtcgttccgcttttatcccgtcacacttgaaaacaacattcccgcatggcgcggtgtggcattttcccgcgggctgaccgtctatcaagatgaaaataacgacctcgttttagactgcaccgagcaggaatttcgtgacatttggtttgattatttcgattttaacacagattacaaaaagtcccgcgaagtgctttccgctctgcaccccgcgctgaaagaagccgccgaattcgcgggcggcatccgcattttaaagcaggagccgtttgaggcgctgtgctcgttcatcatctcgcagaacaacaacattccgcgcatcaagggcattatagagcgcttgtgtctgcatttcggcgagccgtttctttatcataacgagacccgctacgcattcccggcaccgaaaaaattggcctcctgcacgccggaagacctcgctccgctgcgcgcgggctttcgcgcgaaatatctcatcgatgccgcaaagcgcatcgcttccggcgagatcgatttagaagccgtgcgcaaaatgccgcttcccgatgccaaagcaaaattgcagacgatttcaggcgtcggcccaaaagtcgcggactgcgctttgctctacggtctgcaccgcacggagtgcttcccgatggacgtgtggatgaagcgcgccgtattgcttttgccgaggctttcccccgcagatttcggtgaaaacgccggcatcgcgcagcagtacttattccactatgtgcgcatgcaccccgagcttttcaaataaagaattcgtccgggaccggcggcaggtcatcgggtatcgccgccatacttctttttatgatcttcgccatttcttccggcgtttccgggcagccgtacaaaagccacttgcgcgtcacggcaaagtaccccgctttcacaaattcaaaatgatattccatgcagtgctcgctctcgatgccgagccgccgaaaaaaaggcttgaagacgttttcaaacagcgtctgatagcctttttccagttctgccgtgccgaatttctcaaaatacgcccggtaaaacgccctgtcgcgctttgcctcgcgcagcgtcgccgccacatatgcttcggagaagatattcgggtcgccgtgcatctcttcgtgtatccgctctacggactccgtccatttctcctctacgatcgctgttatcagcgcgggtatgtccgcatagtgcaggtaaaacgatgagcggttgatgcccgtcgcctcacaaatttcccgcacggaaatttgatttgtttttttattgagcaccattttcgtaaacgccttgcggatgcgccggtcggtctccgcaaatcgctcgtttttctttgtgttcattttgccctccattaacacaacactcatcgtgttttagcggttgttttccaaatctccacgtgttatgcttgtattaacagaacaagtgttgactttatagtagcgcattgcaaacataaaatcaaggaggaatttttcgtgaaaaccgaagaactttttgagcgcgcacccgtgtggaaatccattttcaagatgtgcctgcccaccgttgtcgttatgctcgtcatgaccgtctacaacatggccgatatggtgttcgtcgggcaaaccggcatcgcggcacaggtcgccgccgtttcgctcgcgtcgccgttttttttattgcagatgacgctcggcacatggatcggcggtggcggctgcaccgtgatttcgacagcgctcggcgcaaaagacaccgaaaaagccaaatccgcaagcgccgcatgtacgcttttaagccttgcttccggcgtcctgctcggcggcgccgcgctccttttcccgaacgccttcctgcactttttcggcgccgatgccgccacgtgggactacaccgcgcagtaccttcagattctggcgctcggcacgcccgtggtggtcttttccaatgtattcgcaaaccttgtccgcgccgaaggtgccgtgcaggttgccgtcatgctcaatatgctcggcactgtcaccaatattatacttgacccacttttcatctccggcctgaacctcggcgtgcagggtgccgccatcgcaacggttctcggcaatgttttaaccgcgctcggcctgcttttttatcttcgccgccgcaataccattttaacgctcaacatgcgcaaagcattccacatgccgcatgtcttccgtgaaatttttacgctcggcattccgggctctgtcagcaaccttttgatgagtgccgtcaacacgatcacaaatcgcattgtcatcgcctatggggccgatactgtcgccgaaatgggcgcgggcggcaaagcgggcatgatcgtcgccatggtcgtcatggccattgccctcggcgtgcagcccatgttcgcatatctttacggcgcgggcaacactgcccgcctgcgcgagaccttccgcaaaagcggcattttggcggtctctctcggcatcgtgttaagcgtcgtctgcttcattttccgctttcctatctgcggcctgttcttaaaggacgaagctctcgtcgcttccgccgcgcacatcacggcgctcggtctcctcggcatgccgcttatcggtatatattatcttgcggtcaattacctccagtccgtcggcaaagcggtgcaggcttccgtgctttccgttctgcggcagggtgccgtttatgtaccgcttctgctttctctccatggtatgttcggtcttttcggcgtgttttacgccgcacccgccgccgatattttctccacacttttagccatcttactcctttaccgcgccataaagaaagatctcgtctccgcaaagccgcattcgcccgcaaaagccaaaaataccttctaaaaatcaactgaattttcatattctgtccatgactttttcccgcgcttctgttatactttaatatagaaaccaatgcagtataaggagacggtacgatgggcgcatttgtagaatttgaaaatgtatcgaaaatttataaaaccggcgatgtagaggtgcacgccttaaccgatgcaagctttgaaattcaaaagggcgaattctgcgtcatcgtcggtgaatccggcgcgggaaaaacgacgcttttaaatatcctcggcggcatggatacgctgtctaaaggcaccgtccgcatggacggacgcgacatcagccactttaaccgcacccagcttgaaaactaccgccgctatgacatcggcttcgtcttccaattttataaccttatcccgaatttaacggcgctcgaaaacgtggaaattgcggcacagctgtgcaccgatgccatccccgccgaagacgtgctccgcgccgtcggtctccatgaccgcatgcagaactttcccgcacagctctcgggcggtgaacagcagcgtgtttccattgcccgcgcactcgccaaaaagccgaagctccttctgtgcgacgagcccaccggcgcactcgattacgagaccggcaaatctattttaaagcttttgcaggatacctgccgccgcgacggcatgaccgtcgtcatcatcacgcacaatgcggcgcttgccgccatggcagaccgcatcatccgcgtaaaaagcggccacatttactccgttcgcatgaacgagcacatcacgcccgtggaacagcttgaatggtaacgcgaagggagccggaaaacgcatgacaaaagcactcagaaaaaacacgcggcgcagcatttcgggcagccttgggcgatatatcgctatcctgctcatcattatgctgggcgtggcgtttctcacgggtctgcgagatacccgtcccatcatgtccgccaccgagaccgcctatataaaaaacacgaagctctacgatcttcgcctcatctccaccatcggctttgatgcggacgacgttgccgccgtgcagaaagccgacggtgtggttgccgccgcaggcagtgtgaatgccgatttcatctggcagcacgacagcaaagagcgcgtttaccgtgcacatatgctgacagataacatcaacgagcctgtgctcactgccggacgtatgcctgaaaacggcagtgagtgccttatagattccagtcgcttttcggaagacatgattggacaaacgatcgaaatttccgactccaacgacgaagatacgaagaaaagcttcaaatacagcacctacaccgtggtcggccttgcagattctccgctgtacatccacacgctgcgcggcaccacgtcgcttggcgacggcacgctgcagggcttcgttctcatcccggaggacggcttcgatttcgagtattacacagaattatacgttacctgcaccgatgaattcccgctatacagcgacgattacgacgattacatcgatacgttctccgatactgtcgaagccgccgccaccgcttccgtcaacgcgcgttttgatcgtctcacgtccgacggcaaagccgaaatttcagacgccgagaacgaactgaacgacaaaaaagccgaagccgaaacggagcttgacgacgccaaagcacagcttgacgatgcaaaagagaccatcacctccggcgaagcgaaacttttcgacgcgaaaaagcaattggacgatgccaaagcacagttggatgcaggcgcagagcaaattcagcccgacttcacttcgtgggaaagcgccctgcaaagcggctttgacgcatattacagcggcaagcagcaattagaggatgcccttgcggagagtcaggcgcagatcgacgccggttacgcgcagctgcaggaaaacgaaaagctctacactgaaaaatatgccgaattcacatccggcaaagagcagtatgaagcgggtcttaccgccgcaaaggacgcccgcacacaaattgacgccgcacgcgccgacttaaacgagaaaaaagcgcagctcacggcgggctttgccgcactcgacgaagcgcaggcgcagcttgatgccgtaaaagatacgctcgacccggcagaagccgaagcgcagcaaacggcgctcgatatgcagcgcgccgctttgaatcaaaatcagacgcagctcgacgatgccgaagccgtattaaacgaacaggatgccgccctcaccgcgcaggaagcgcagctcacagagaccggcgagcagctcgatgaagccgaaaccgccctctcgcaaatgcgcacgctgctcgatgtcggccaaaacgattacaccgacggcatagcacaacttgaatatcagagaaaaacgcaaactgcaaagcttgacgaagcgtatgcttcgctcatcacgtttcaaaacggcatcaaagaatacaacgagggcctcgcttcatacaacgacggcgtaaaagagctcgccgacggcaaagccgaatacgaagacggccttaaagactacgaggacggcaaaaaggaatttgacgagcaaatctccgacgccaaacagaaaatcgccgacgccaaacaagagctcgccgatttaaagaagccggagctctacgttttaacacgtgacacaaacgccggctacgtctcgtttgaaagcgattccaccatcgtcgaaaagctctcgggggtcttccccattttcttctttctcatcgcggcgctcgtctgctccaccaccatgacccgtatgatcgacgatgaacgtacacagatcggcacgctccgcgcactcgggtacagccgcggctccatcctcgcaaaatacctgctctattccggcagcgccgccgcactcggctgtgtcatcggctattttgcgggcggttatgttttcccgttcgtcatctggacagcctacggcatgctgtatcgcattccgggtttcgtcctactgtatgaccccgtgctgtttgtcatcgcgcttgcggcgtcgcttttatgctcggcgggcaccacatatttagccctgcgcatcgagatgcagaacatgcccgcaaacctcatccgcccgaagaccccggccgccggaaaacgcattttcctcgagcgcatcacgccgctgtggaagcgcctgaaattcctgcacaaggtctccctgcgcaacattttccgctttaaaaagcgcatgattatgatgattctcggcattgccggctgcaccgcgctggtactcaccggcttcggtatccatgattccgtcgcgaacattgcaaacttccagtttgatgatattcaaaaatacgatgtcagcgcccagttctccgatacgctgatcgaagataaaatcaacgaagtcgaaagcgaccacaaatcggaacttgacgccgccaccgccgtgcagatgacctccggtgacgtcacaggcgacagcatcacaaaatccgcttacatcgtcgcgtccgacgaccccgccatcaccgacattttcgatctgcatatcgacggcgagaccgtaccctaccccgacaaaggcgaagtgctgctcaccgaaaaactcgccgagctcaccgatatcaaaaccggcgataccgtcaccgtctccgtttcggacacggaaaaagctgaactcaaggtcgcgggtttagttgaaaactacgtgcaaaattacctctacatgacgggagaaacgtacgccatggtcgccgataagggctacgagccgaaaacgctcctgctgcgcgtaaacgacagcgcagacgaatatgcgctttccgccgcactctccaaaacggacggcgtatcctccgtttccgtcgtcaccgatacgcgcaatatgatcgaccaaatgatgcagagcctaaactatgtcgtcgcgctcgtgctcatttccgccggcgcactcgcgttcatcgtcctgtttaacctcggcaacatcaatctgaccgaacgcgtcagggaaattgccaccatcaaggtgctcggcttccattccggggaaaccggcgcgtatgtgttccgtgaaaatatcattttgtccatgatgggcatcgtcgtcggcctgccgctcggcgttctgctgcacacatttgtgctcatgcagatccgcgtcgatatggtctctttcaaagctgtcatcgcacccgtcagcttccttttgaccgttgtcatggtcgtgctgttcacggttatcaccgacctcgtcatgcgcaagaaaattaccaaaatcgacatggcggaatccttaaaatcgatcgaataaacaaaagctctgccgcaccccgttgccgcagagcttttgttgtgccataatccaaacgataaataaagttggtcgcgtttcgccggaattcaagaccgccacggacgacctgtgctgcttcatgagcctgattgcgaccatgctttttaaagacacccacactttcggcacgtttattcagacatggggcatgaacttcccgtgcgccgtgctgtggcaaatgttttactgtagcccgctcgtccgcctgatttttcgcttgattttcagggaaaagaaaagtaaataagcatagaaaaaattctccctcggctccgcagccaaaggagaattttctttatcccggcaaaatttccgccaaaatcgcgttggagaccaaaaagccttccgcggtcagcgaaattcgctcgtaatctgcatgtatcagatttttcggcaagtgcttacaaccttccagaaccccgtcaaacagcgcaccgccgttttcaaatcgtgtctcgcaaatctttctttgcagcccctcggtcagccgaagcgacagcatcgcaaactccgaaaaaccgccgcccgcgccgtcgtctgtgggcacattgccgtttaaaaagccctctaaatcgcgtgggaaataaaatcgcctgccctccataaaggagtgcgccgcgggaccgagtcccaaatattccccgcaccgccaatactgcaaattgtgtcggctctctttgcccggccgcgcaaaattgctgatctcatactgggcgtacccgtgctttttaagctcgtttacggcaaacaaatactggtctgccgtgccgtcttcatcgggcagattaagctcttgctttgcaaacggcgtaccgggctctatctttaaaatatacgcggaaacatggtcggcctcgagtgccgcgcaaaaatcgatcgagcttttcagtgtctccaagttcgagttcggcaggccgagcatcaaatcgaccgaaacattgtcgatgctcgcttctctcgccgcttccaccgcttcccgcacggtttccgccgtgtgcctgcggccgagaattttcaattccgcctcgtttgcggactgcatacccattgaaatacggttgaacccgccgcgtttcagcgtttcaaaaaatgaaacgtctacatccgccgggttgcactccgtcgtgatttccgcgttttcggcaacattaaactgctctttcactttttcgagcacgcggcacagtcttttcgcaccgaacacactcggcgtgccgccgccaaaatataccgtatgcagcagccgttcgccgtatttttcaccgtacactgcaagccgcgcacacagcgccgctaaatagcggtcaaatacgtcgtcttcttccggccgcgcggagtagaaatcgcaatacgggcacttgcttttgcaaaacggaatgtggatatacagcgaaaacggtttattcatcgagcttcagaaccgccataaacgcctcctgcggtacttctaccgtgcccagctggcgcatgcgcttcttgccttccttctgtttttccagcagcttctttttacgggtgatgtcaccgccgtagcacttcgccaaaacgtccttgcgcatcgctttaacggtctcacgcgcgatgatcttgccgccgatgcacgcctgcaccggcacctcaaacaactggcgcggaattttctccttcagcttttccaccatcttgcgggcgcgcgggtacgccttttccgcgtggatgataaatgaaagcgcgtccaccacttcgccgttcagcataatatccagcttcacaagctcgctcttgcggtagccgatgagctcatagtcaaacgacgcatagccgcgcgtgcgggatttcagcgcgtcgaagaaatcgtagataatttcattgagcggcagctcgtagtgaatatccacacggtcggtgtcaatgtatttcatatccttgaaaatgccgcgtctgtcctgacaaagctccatgatgttacccacaaattctgtcggggagtaaatgtgcgcgttcgcaatcggctcctccgccagtgcaatgtgcgagggatcagggtaattcgtcgggttatcgatggaaagctttgtgccgtccgtctttgtaatgtggtacacaacgctcggcgcggttgtgatgaggtcaaggttatattctctctccagacgctcctgaatgatctccatgtgcagcagtcccaaaaagccgcagcggaagccgaagccgagcgccacggaggtctccggctcaaacgtcagcgccgcgtcgttcagctgcaatttttcgagcgcatctctaaggtctgcatagtgtgcaccgtctgccgggtacacgccacagaaaaccatcggctgcaccgcacggtagccgggcagcggctctgccgccggtctgtccgccagcgtaatggtgtcgcccacgcgcgcctcgcgcacgtttttgatcgatgccgtaatgtagccgacttcgcccgcggaaaggctctttgcgggctccaaagacgtcgcgcgcagaatgccgcactccaccacggtgaactcactgcccaccgccatcatgcggatggtgtcaccggggtgcaccgtcccctctttaatacgcacatacgcgataacgccgcggtatgcgtcatagtaggagtcgaaaatcagtgcgcgcagcggcatgtccgggtcgccctgcggtgcgggaatatccgtcacgattttctccataacggctttgatgttgaggcccgttttcgcgctgatgcgcggcgcgtcctctgccggaataccgatgacgtcctcaatctccgccgcaaccttgtccgggtccgcggaaatcagatcgatcttgttcaataccggtacgacctcaaggcctgcgtccaccgcaaggtacgtgtttgcaagcgtctgcgcctcaatgccctgagaagcgtccaccaccagcaccgcgccctcacaggccgcaagtgagcgggaaacctcgtagttaaagtccacgtgacccggggtatcgataaggttgaacgtatatgcctcaccgtcgttcgcgcggtagacgagcgtcacagcatgcgccttgatggtgatgccgcgctcgcgctccagatccatgttgtcgaggatctggtcttccatgtcgcgcttcgcgaccgcctcggtctgctccaaaatgcggtcggcaagcgtgcttttgccgtggtcaatatgtgcaatgatgctgaaattgcgaattttactctgttccaagcgtgattctcctctttagaagtatacatagttaagtatagcattttcacggcgtttgcgcaatgactgcttttgaaaaagtccgcattttaaggtgcttcacaccttgcgcttttctgcctaaacgtggtatcatagaaaagacaaaaccacgcgtatacgtggttccataaggagaaccgatatgccgagattttttacatctgccgtgcagtttgacgaagccgcgtccgtaggctctgccgtcatagacggtgaagacggccgccacatcgcccgctccctgcgcatgcacacgggcgacgccctcacgctttcggacggtgccggcaccgactacacaggcgaaattgaaagcatcacgggcgataccgtcatggtgcgccttaccgataagtttaaaaacagaagcgagcccaccctgcgcgtcacgctgtaccccggtatgccgaaggccgataaactggagctcatcacgcaaaaagccgtggagctcggcgtcacgaagattgtgcccgttttgacttcccgcagcgtttcccggccggatgcaaaatccgtttcaaaaaaacaagagcgtttgcagcgcatcgcgcttgaagccgcaaagcagagcggccgcggcatcatcccagaaatcggtaaaatgaccgatttggagtccgcactcaaaaccgcacccggcaaaaagattttattctacgaaggcggaggcgaagcgctcggcacgctcgtctcccccgatgaggccgaagtttccgtcttcatcggcccggagggcggctttgacgctgccgaagtgcagctcgctaaacaatacggcgctacacccgccacgctcggcccacgcattttaagaacagaaaccgcaccgcttgcggcgctttccgttttaatgtacatcacggggaatatgcaatgaaaacagttttagtcaccggcgcgtcgggtgagatcggcgctgccatcgcaaaagaattcgccgccgcaggttacgccctcgcgctccacggcgcaaagcacattgaaaatgtaaatcaacttgccgaaactttcaaatcaaacggcatcgaagcctatcccgtctgcggcgacctttccgaccccgccgcatgcgagcgcgtgtgggcggacaccgaaaaaaaactcgggcatattgacgctctcgtcaacgccgccggcatctcgctcgttgattttttcgacaccatgacgcccgcacagtggaaaactttgtgtgacacgaatctgtcctctgccgtttacctctctcaatgcgcgtcccgctccatgatccgccaaaaatccggcgctatcgtcaatgtctcgtccatttggggcgtgagcggcgcggcaatggaagtcgcatattccgccgccaaggccggtatgctcgggctcacccgcgcactggccttggagctcgccccgtcgaacatcaccgtcaatgccgtcgcacccggctatatcgataccaaaatgaacgcccatttgtccgaagacgaaaaaaaagcgctgtgcgaggagattcccctcgggcgcgcaggcaccccggcagaggtcgccgcaggcgtcagatttttagccgaaagcccgtacatcaccggtgaaacgctcgtcatttcgggcggctggcgttaaggagaatatttaccatgtccaaacaaatcgatgcttattccttcgcactcggcgtgtgcgaggcattctgcgaggttgtccgtgccggcgtaaagcgcatcgcgctcagccacccgttcacagaagacgaacttcaaaacgtactcggcgcagattttctccccgcgtgtgaagcagttgcccgaaagtacggctgcaaagcgtattatttaaaagaaccgctcatcaccgaccttttcccggtctcgttgaacagcggcaagcaaaacgtcgttttctaccgcgaagaccgtgaccttaaagaattcttaagcatccaacacgataaacaaaccctcatcgccgaaaacaactatacgggcgaaaaccgccgccaaatcgccgtgcgttacgggcatctgctctcgtacagcgacgaagccatcgcccgctatttatcgcaaaatacagaactcgagtaatcaaaggagcacccctatgtccatgaccattaacaaagagctgccgaacccggcggccctcaaagccgaatttcccgtcccggagcacatcaaagaaatcaaagccgcgcgcgataaagagattgccgccgtgttccgcggagagtccgataaatttatcgtcatcgtcggcccctgctcggcggataacgaagaaagcgtctgcgaatacacccgccgccttgcccgtgtgaacgagcaggtgaaagaccgcctcattctgattccacgcatctacaccaataagccccgcaccacgggcgagggctacaagggtatgctgcaccagccggaccccgataaagcccctgacctgctcggcggcatcatcgccatccgcaaaatgcacatgcgcgccattgaggagaccggcctcacatgcgcagacgaaatgctgtaccccgaaaaccgcagctatttggatgaccttctgtcctacgaagccatcggcgcgcgctcggtcgagaaccagcagcaccgtctgactgcaagctctatggatatccccgccggcatgaaaaaccccacttccggagaccttgccgtcatgatgaactccatcaaagccgcccaaagcgcgcacaacttcatctaccgcgggtgcgatgtcaccaccaccggcaatccgctcgcccacgctattttgcgcggcggcgttgataaatacggcacaactatcccgaactaccactacgaggatttaaagcgtcttgcttccctctacgaaaaaagcgggctcgaaaatcccgcctgcgtcgtggatgtcaaccactcgaattccggcaaaaagttcaaagagcagatccgcatcgtcagcgaggtgctgcacagccgttcctacgaccccgccatacacaagctcgtcaagggcgtcatgattgaaagctacctcttcgagggcgcgcagaagatttgcccggagatgatccacggcaaatccatcacagacccctgcctcggctgggaagacaccgaaaagctgctttacagcatcgcggaaaaagcgtaaagggagttgtaagatgaaactgtacgtcacacgccacggcgaaacacccatgaacgctgcgcaccgcgtctgcggactcacgaatatcgacctcaccgaaaaaggcatcgcgcaggcaaaagaagccgggcgcagcctccaagataaaggcatcaagcgcatcatcgcctccccactcctgcgcgcccaacacaccgcaaggctcatcgcagacgagatcggcatagataccatcgagaccgaacagcagctcatcgagcaaaactatggtatctacgaaaataccgattgggacggcgaagcgttcaacgcaaataagcgcgagttcgccgtacgctaccccggcggtgagtccatgctggacttagccggtcggctctacccgcttttaaacaagctgaaagccgaaaacggccccaccacgctcctcgtctgccacggcggcatctgccgcatgatccgcacctacttcttagatgtcaaaaacaccgactacgccgccttcaagcttccaaactgcggcatcatggagtttgagctataaaaaaagcatctcggctatagacgggtgtccgtaaaacagttaatcctccgtatggcttagaccatgcggaggatttgtttatgtctaatcttccaacttgctggcggcaaacggtttgtcaaaaccgtttgcagacggcaagtccacaggggatagccgctttagcggcgcaagggggtgtagccaccttgacggaacgaagtgacgaaacattctcggtcgtgcagttttcttctgctgaccgggaatgaagctccgcaggacgcactactctcgatagagagtatagaagtgcgccctttagttcctaaagggattttatcagttcgccaaactggaattaaccagtttcttgtaacctttcgaatagttggctatcaattttataaattccttgataaggctgttcaatatagtatttaccactatcctcatacgcaaagatagtacttgttcctgtctcaaactggacgtcaattttgatataactttccacttgtggacagtcttgaacactttccttcttagtcggttcagaactggaaatatcggcgattatttcacttatccaagttttgtctgaatgacttactgtattttccccaaaagttatatcaatagatgtaatctcgtcggtttgaggtaacgtaataggagctaccttttttccacacgcaactaaagtcagcacacaagtaagacacaaaaacaaagaaagaaattttttcataagcatattacctccaacttccgatttgttgctcacttttcgtattcaaattataccataaaacttgtgaacagttctaccgcaactttggaatatatgagaaaagtccgaacagttttctgcccggacttcctcactcaatcgtaaatcaattcgattttcacaatttcctctgcctgtgccttgcaagcgttcatctgccgtacccattccatttggtgtcggctttcagtttctcggtcacgccgtttcgcttcgccagctccggcacgatcagctccatgcggtttcgtgccgcttcgtcaatcttagtgcaatactgtcttacgtacacccagctatgccgagatgctttttgctttacgcttccgtcgcagtgccatgctgcgggtcgtgctcgcgtttgatgcagcggtcaagccacttgcctcgcaaatagtaaataacgaagatcaccgccgtgatgacccatgataccgggtagttcatcgcgaccatctgcatcgtgtgccaatatggaaccataagcaatatccacacgacgcgcagaccgcatacgccgatgcaggtgatgagcatcggctgcaaagcctcgccggcaccgcgaatcgcgccggacaaaatctcgataaaaacaaacgtaaagtaagacggcgccaataccaaacagaactgcgcaccgatatttacaacctccgcatcgcccgtaaagaacatcaaaagctgatagcggaaaataaacagcagcgcagaaagcgcgatgatcgtgccaaggcacatgccaagccccacacgcgtgcagcgcttcatgcggtcatactggcgtgcgccgaagttctgcccggcaaatgtcgtcaccgcaatgccaaacgcgttcatcaccatccagataaagccgtcaatcttgccgatagccgcccaggccgcgatagccgtcgtgccaaagctgttgatactcgcctgaatgaggatattcgagaatgaatacatcacagactgcaagccggccggcaagccgatgcggaccacattctttagaatatccttgtgaaagcgaattttgcgcagctccacacggtatgcttcctgcgtgcccatcaggcggatcatcaaaagcacggcgctgatcagctgcgataaaaccgtcgcaaacgctacaccgaacacaccccagtgaaacaccaccacgaacaataaatcgagtaccacgtttgcaaggcagcacacaatcaaaacatacagcggcatgcggctgtcgccgatggcgcgcagaatacccgtgccgatattataaatcaggttgccgatgatgccgagataatacacgttcatgtacaaaaccgcgtcatccatgatgtcgtccggtacacccatcgcaagcattgtcgggcgcgacgtcacaatgccgatgaccataatgacaacgccgcccgccaccgccagcgccatggacgtgtggacagatttagaaagactttcgcggtcgtttgcgccgaaatattgcgaaatgatgaccgttgcgccggaagctacgccgacaaaaaagcctacaagcaggttgatgaccgtgcccgtcgtgcccacagccgccaacgcctcggtgccgacaaactgaccgacaatgatcgtgtcaaccgtgttatacaactgctgaaaaaaagtgccgatcaagatcggaaagaagaaaagcaaaagctgtttccaaataacaccttccgtgatcccgttttttattttttccaaacgttctccccctttgataccctataacgcctattcttaaaccgcgctctaaacacgcatacgcccattctaacaccttttctcccatttttcaagcggttacaaaaataaaagtacgaaataggattttaatttgacatcgtgggagatagccgcacccgtttcccggcgcgtatatttcaatcctaccgtacgcaaagcttttcgcgcgtggttcatcgaaaattccgccgccggaaagctgttcagtaaacggaacgacaaaggcagactttttagctactaaaaaacgcccgcagggtcaaaccttgcaggcgctttcactttacttttctttactccacatacgtaacggggaatttcttctccttcacaggcgtttctgctgccgcataaccgatggccgcaatgccgaataccttgtggttctccggcacgccgaactccgtcaaaacggcgcgcacctcaggcacgtcgcacgtgtcggaaagctggttgatccacacagtaccaagccccatggaatgcgccgcgaggaagatattttcaagcgcgcaggcgttgtcccaggacgtgatacccgtgtcgccgatcagctcgttcgacggaatgataagcgcggcgggcttatacatgtcgtacttctcgttgccgagcgccttgcccacagccgccgcaagcttcgcgattttctcgcgatttaaaacagcagaaaaatgccatgtctggcggttcatcgcgctcggtgcatgcacagcgcactgcaaaagcgtatcgatcttttctctctccaccgggcggtcgtcatacgcgcggacactgcagcgggtcaaaatgttctgaatcacttcattcgtcataaaaacgcttcctctctttggtttttcgggtatgtacccttatttttaagcggtcatccgcttattgactcaaaatttttccgccaaaagcgcggcgactttctctaaaaacgcctcatcttctgcggtaaagcgatcttcaaacgggctgtccacatccaaaacagcatagacttttccgtctttcatcaccggcaccacaatctccgcacggctcgcgctgtcgcaggcaatatgccccgggaacgcgtgcacatccgctacgcgcagcgttttcttctccgcaagcgctgtgccgcacacaccgcgccccgctttgatgcggatgcacgccggtttaccctgaaacggccccaacagcaaattgccgtccggctgcaccgtgtaaaagcccacccagttgatgtttttcagtgttagattcaacagtgccgaaaggttcgccatgttcggcacaagctccggctcgtcttcaatgagcgccttcgcctgcaaaacgacgtcttcatacgtcccgctgccttgaagctcaaaactcattttttatactccttgtaaacaaagcgttgacttcatcgtgcgcattttcgcctttatacaacacattgtataccgcgcggcaaatcggtaaatcggctgaaaccgtcttgccaaggcgcaaaagcgcgtccacggcgtaatagccctccgccaaatcggtgtacggctcgtttttcacaaacttctcgccgaacatgcggttgtgcgaatacggcgaaaacagcgtcgcttcgtagtcgccgaggtgacaaagcccgtaagccgaaagctcgttgccgcctaaagcgtcaatcagccgcgcaatctcacgcgtgccgcgcgccatcaaagcgccttttaacgtcgaaagcccgaggccgtccagtataccggcagcaatgccgacgacattcttcgccgccgcaccgatctcattgccgatgagatcctgtccgtagtaaaagcgaatgaggtcgctgccgaatgattccaccagcgtcttttttgcgtcttcactgtcgctgtcaatgaccatgcagttcggcacaccggccgcaaactcctgtacatggccgggaccaacccaaacggcgaccgcgttcgagttgtcacactccgcggcacacacctgggaaagccgcatgccggtttcaatctccacacctttcatgcacagcacgaaaattttatttttcagctcaaacggctgaagctcgcgcatcaggccgcgcaggccctgcgagttgacggagattacaatcacgtcgctgtctttcacaacgtccaaagaatttgtcaaatgtaaggtttcgggcagctctacaagcccgttcgcacgggtttcgatgagcttttgcatgtgggcagagcttttccgcccgtaaagggaaacactgtggccgatcttatcgaggtaccacgcgataaacgtgccccaacggccgcagccgataacggtaattttcatagggaatgctaaggtccttccaaaggagtaatgtaagcgcgaaattcaaatcacagctctgtaaataaatcttttgcgtctttggcgtaaatgatgccggaaacgacggcgagcaaggttgcaatcgccatcacgacaaaattcacccatgtaaatatcggagaaagcgtctccgtcggcaaagccaaaatgccgtatgcgccaagatcgagaatgtactgcgtcaacagcacgatgcagattgcgacaatctgcgacacggttttcgccttgccccagttgttcgccgggatcaccctgccctgctccaccgcaataaggcggatggacgtcacggcaaattcgcggaccataataaggagcacaaataccgtgttcgtcatgccgttcgccacaaagcagacaagcgccgacatcaccatgatcttatcggccaaggggtccatcagcttgccgaaatttgtgatgaggtgatcgcgccgcgcgattttgccgtccaagtggtcggtgtacgacgcaatgccgaaaattgccagcgccactaaattgtggtgtgggaatatgtcgccggaaagcagcatgaaaagcacaaaaaacggtactaagatgatgcgcagtatcgtcagtttattcggtaaattcatagcggttctcccgtttagacgcgcgtaccgaacaggtcgccgtcaatggcctcgtccacgtgcaccgttaccatttcaccgtagtacggcttcgtttccgcagagaaaaacaccttgccgtcaatgtccggcgcatccatggcgctgcggccgaaccagcattcggcgtagcggtcaaagccctccgtcaacacggtgatgtcccctctgtaggactacaatacatcttggacaattgaataaaaagggtatgaggaatagggcctcatgtgttaaagttaagctaccacaccaaactttccgaaaggagaccatattcctcatgagtaagagtataacacaggacatggcctacagacaatccctaatgaagtacgcagaaaagtacggcgtcagccgcgccagccggaaatacaacaagagccggtcgtacatctacttctggaagcagcgctgggacgggagtgtggcgtctctggcctgccagtccagacggcctcacagccaccccaaccagcacacggaggccgagctaaagctcatccgcgatatgcgccgccgcaatccgtcgctgggcatgatcgaactgtggcaccgtctgcggaagcgcggctacacccgctgtccggagagcttgttccgcgttatgcgcaaaatggggctgtttccggccgaaaagcccaaaaatccgtacaagccgaagccttacgagcagatgacctatcccggccagcgcgtgcaggtagatgtcaaggtcgtcccccgccgctgtatcgcagatccggagctgcgcctgttccagtacaccgccatcgacgagttcacaaggctgcgtttcctggcggcctacccggagcagtccacctattcctcggcggacttcctgcgcaagctgcgggcgtggtacgcccgcagaggcatagaagtggagtgtgtccagacggacaacggtttcgagttcaccaatcgtttctccaacagcaagcgcgatctgcccacactgttcgagaaaactgccgccgagctgggcatccgtcacaagctgatccggccctacacgccgcgccacaacggcaaggtggagcgcagccaccgtgaggatcagaaacgcttctattcctgccattcgttctattcactcgacgactttgccaagcagcttgccgtccataaccgccgcgccaacaacttgcccatgagacccctccgctggctctcgcctaatgagttcgctgtccaatatgtttgacaaacctacactccgtcaacacggtgatgtcccctccaacctgcttttcgccaaggcggtccataatattcatctgtgattccatgatgatctccgcgcggtgattcttcacctcgtcgtcgatctggtcgggcatcaaagccgccggcgtgccctcctcctgcgagtaggcaaagcagccgaggcgctcaaattcaatgtctttcacaaattccgcaagctcggtgaactcctcctccgtctcgcccgggaaacccgtaataagcgttgtgcgcagcgtcacgcccggaatcttctcgcggattttcttcatcagcgccgtcaggctctcacggtcgccggtgcggttcatgcgctttaaaacgcgtgcggaagcgtgctgcagcggcagatcgatatacttcacaatcttctcttcctccgccatcgtctccaaaagctcatccgtcaaagcgtccgggtaacaatagagcacgcgcagccacttgaggccgtcaattttgcacaggcggcgcatcagctttgcaagggaatattcgccgtacaggtcaatgccgtagcgggtcgtatcctgcgcaataaggatgagctccttcgctccgttttcaacgagaccgcgcgcttcttcctcaatgctctccatcgtgcggctgcggtagccgccgcggatcatcggaatcgcgcagtaagtacatttgttgtcgcagccctctgcaatcttgatatacgcaaaatagctcggggtcgaaagctcgcgctcgccgcacagcggcattttgctcttttcgggaaagctctccgtaaaatcattcattgcactttcaatgcacgccgcaatgtccgcgttcgcgccgatgccgaacacgccgtccacctcgggcagctctttgtgaatttcctcgcggtagcgctccgcaagacatcccgtcaccacaatcttcttgatgcggccctcttttttcagcgtcgcaagctccagaatttcatcgatggattcctgcttcgcgctgtcgataaagccgcaggtattcacgattgcaacgtctgcaagcgcagcgtcatcgcacagctcaaagcccgcgtttttcaggttcgccatcagcatttcgccgtccacctggtttttggcacagccaaggctgaccattcccactttaattgccatgtatataaccctttctcggtgcatatccaagccttagacatgcccttatataatttctgttctgccgctacctattttagcagaaaacgagcggcttttcaatcgaaatgtcgcccgttcacaaaaatcatacaattatacgcgcaaaaacacgcttgccgcccggaaatcatgctttttttgtgtagcacagccaccacgcacggcactttgcccgggcaccagatgtattccgcatccgtatagtccgcgtccttaaagaactgctcataggagctcagtataaattcccgcttaaaatccgcacccgctccgcacaatattctgtgcgtcctgcggttgatgacattcgtaagtatatcatgcaccccggcatcccgatttcaaaacataaaagctctcctgttgattttaaaccgtgatctgtacaaaatacactcgtttttcctgcgtcgataccagtatatacaacctgctgccgtcctctttttccagaattttgccgcttaaattttcttcaaacggcggcatgctttcttccggcacaccgatctgcttcaaagtcgtttcaagctcatcctgcggaaattcaacattttcctgcacaaaagtcgaaaacgtgtccgctttttccgcctcaaaagccgtgtaccgcacaccgtcgccgagcgccatatctttggaatgtgccgaataaacctccgtcatgccctgcggtagcttgattttccataattccgcgtattgttcggcgttcgtctgcataaagcccaatttcagtcccacgccgagcgaaacaccgaaaaccaacacgcagagaattccgatgcaaaccgactttttcacagcttcacccccggaacacaaaacggccctgcaaccaaagcagcgccgttttacggtcattcttctgaatttaagacagagaagatctcgtcgaaaccgtagccgtagcgctgcaaggcggctacggcacggcggcgcactttttcgtcttcgcgcgccatgggatactttcgctccaaaatggcgcggatgttttcctctgtttccgaacgttctgtggaaaactcgtccatcaccgcggcgatgagcgcgtcgtcaatgcccttttggcgcaactcctgctttacgcggcgcgcgccgaattttttgcgtgtgaaaagctcgtttgcaaggcggcgggcgtagtcctcgtcatttagtaagcccaactcttccatgtgctccacggcgcttcgggcagcctcgcggtcaaattccgcgcgggtgatcttgttttccagctcttttttggagtgggcgcggtgctccaaaaggtacagcgccttttcctcggcgcggtgctttgcggaggcctgcaaaagcgcgtgcagctcctcgtcgtcgagctcgtcgccgatggcaatgccgcggcacaaaagcgtttccgtgtccaccttcaccgccgcttcgccgtcaatataaagctgtgaaagcctgtggcggcgcggggcgatgtccgtaatcttcattattcgtcatcatcgaccgtgatgtcgatgtccgcctgcacattcttacgggtgttctccgcctgctcgggggattcttcctcctcggccttttcaacgggcttcggcgcactgccgcccttgatggactttgcgtagagcttatccgcgttctgacggacgagctcggaaatttcctcaaaaatatccgggttgtcgcgcaggaagttcttcgcattgtcgcggccctggccgatacgcgtgccgttatacgagaaccacgcgccgctcttctgcacgatctcgagcctttcggcaaggtcaagcaggtcgccgaccttcgagatgccctgcccgtacatgatgtcgaattcgacctcacggaacggcggcgcaaccttgtttttcacaaccttgacctttgtgcgggagccgatgatgtcggtaccgctcttcaaaacttccttcttgcgcacatcgagacgcacggaggagtagaacttcagcgcgcggccgcccggtgtgacctccgggttgccgtagacaacgccgactttttcgcgcagctggttgatgaaaatggcgacgcagtttgacttcgagatggcaccggcaagctttcttaacgcctgcgacatcaaacgcgcctgcaagccgacatggctgtcgcccatttcgccctcgatctccgcgcgcggaacgagcgccgccacggagtccacaacgataacatcgatggcgttggagcgcacgagcgcctcggtgatctcgagcgcctgttcgccggtatccggctgcgaaacgagcagagaatccacgtctacgccgagcgcggacgcatagaccgggtcaagtgcgtgctccacgtctataaacgccgcgttgccgcccattttctggccttcggcgacgcagtggagcgccaaggtggtcttaccggaggattccggcccgtagatctcaatgattctgccgcgcggcagaccgccgataccgagcgcgaggtccagcgaaagagagccggtggagatcgcatccacgtgcatgccgttgttctggccaaggcgcatgacagcaccctcgccgaactgctttttaatctgcgtcaacgcagtctccagcgctttgcgcttgtcttcgggcttgatgtcctccacttttttgcttacggggcttttattttccttcgccatggttatatcctcacttcttttgaaatttgggttatggttcctgattgattgtgtttccgtcgagcgtggttaaagttttcgccaacctttttcaaaaggctgcggtttccaaaggtgaaactctttttttactgcctctattatactaaatccgtcgaaaaaaagcaacggttttctcgaacatattttcttttcttgctgaggtgagccaaaaagcgacagccaagaggacatcacaggacatctttttgcgcaaaaagggcagaaccccggagaaaaccggaactctgccccttttttagcttatgtagaaattacagaccgagcagttcggttgccgctttctccatttttgcgatgatctcatcggactctgcggcggttttacccttgcctgagaggtagattttgatcttcggctctgtgccggacgggcggacgatgagcttgctgccgttctccagacgatactcgagcacgttggacttcggaagcgtgatctccgtcttctccgcgccctctgtgcgcacggaaagctgatagtcgctgtcgccgacgaccttgaagccggcaatctctgccggagcgttgtggcgcagatgatccatgatggaattcatcttcttcatgccgtcttcgccctcaaacgcgaagttgcacagggcattcttgtagtagccatacttttcgtacagaacattgatggcatcgacgagcgtcatgcccttttctttgtagtaggaagccatttcgcagatgatcatgctgccgtccacggcgtccttatcgcgcacatagccgccggagaggtagccgtagctctcttcaaagccgagcaggtagcgctccgggtggccttcgctctcaagcaaagcaatctggtcgccgatatacttgaagccggtgagggtacggcgaatttcaatgccgtaatccttcgcgatgccgttgaccatatcggtggaaacaatcgtcgtgaccgcgaccgggtccttcggcatggtgccgagttccgttttgcactgtgcaataaagttcaggagcagaatgcccacttcgttgccggtcatgagcacatactcgccgtgctggttgacggcgatgcctacgcggtcacagtccggatcggtcgcgagcagcaggtcgggctttacggtcttgcagagatcaaggcccttctggagtgcttcgcggatttccgggttcgggtacgggcaggtggggaagttgccgtccggctcgctctgctccggcacaacggtgatgtccttcacgccgatgcggtcgaggatgcgcagcacgcacattttgccgctgccgttgagcggggtgtagacgagcttgaggttatccgccggcttaccgaggatgctcacgccgtaaaccgcgtcgatgaacgcgttgacggtctcttcgccaatatattccgccttgccggaagcgagcgcctcctcaaacgggattttcttcacgtccgcgaaaatatcgagcgcttcgatctccgccataatgccgtctgccatgccttccgttacctgacaaccgtcgttgccgtaggccttatagccgttgtactttgccgggttgtggcttgcggtaacgcagatgcctgcatcacagtgcaggtgacgcacagcgaaggacagcgccggggtcggcatgagttgcgggtagaggtacgccttgatgccgtttgcggcgagcaccgctgcggactctttggagaacagcacgcccttgttgcggctgtcgtgtgcaatggcaacggaaaggagcttaccctccgtgttgtgcttattcaggtagtttgcaaggccctgtgtcgccttgcgcaccgtgtagacgttcatgcgattcgtgcctgcgccaatgacaccgcgaaggccgccggtgccgaaggcaaggtctctgtaaaaacggtcgtttatctcctcgggctgatccttaacggaaagcagctcttctttcaagtcgggatcgtccagttcgacgctaagccatctttcatactcggtcatactctattcttccttccatggtttaaattttcggcagtgcgaaaaaacgtatctgccttatgttaaatgcggatgacccgcacctacacgctataattagattaccattttatctgtgcaatgtcaatgacaaattgcgtcgctccatgtcaatttatgtgtaaaatatttgttagtatcccggcgggcgaaacatcaaccaacccacaggttgcgcgaaagcccgagcaggagccggggtttaagatatacagtccgtcgtcgtaggtctcgagcgcctcgtgcgtgtggccgaacagcaaaagattcgcacccgcttcccttgcggcgcacacaacggtatagagccctgatttcacatggtaaaggtgcccgtgtgtgcagaaaattttagcgccgtcaaggtctaaaatttcgcgtaccggcacgtctgcgcagccgaggtcacagttgccgcgcacggagtaaaatgcgatattcgggaacagggcgcgcatcatttgaaaatcgttttgcccgtcgccgagaaaaatgacggcatccacgtctctgtgcttttcgagcgtttcgcgcatatagagcggcatgccgtgggaatccgaaaaaaccagcagtttcatgaaaattctccttcttttgaatttaacgcagatgaggtctcattttttcgcgccgcgcataaactgtaaacggaagtttccctaaagggagggtttaccatgaacgaacgtgaaatacaatcgcttttggctttggcggcgaaacggctgcacaccacgccggaagcgctgcgcgccgccgccgaaaacggcgacctgcagaacattatgggcggtcaaaataacgcggcggcttcgcagctaaaccgcgttttaagcgacccggaggccgcgaaaaagctgctttccacacccgccgcgcagaaactgtttgaggctctcggcggcaaaaaatagaaaggaggtgagcggcggtggaagacctggccgcagccgtacaatccattttaaacgacccgcaaagcatggcgcagctgcagggcgtgatgaactcgcttggcatgaatccgccgcaagcccctgccccggcttcgccgccggtgcagcaaaaaccggcggccgccgcgccgctcaatttgctgaacactctaaacaacagcgatccgatgacggcgatgcttttgcgcgccgcgccgcttttggcaagcgcgaaccgcgaggatgactccacgcgattgcttgcggcgctgcgccctttgctcggcgaagcacggcagaaaaagctggatgaagcctcgaaaattttgaagctcttgcaccttttgccgcttttgaaagagagcggcgttttacagaatattctttgagaaaggcggggtaaaatgccgagtaacatgccggacgcacgcgccgtggaagaagccttgcgccgcgcgcgggaaatgcaggggcgctcggcgcatcacgcgccgcccccgccggaaaagtcaacggaggaatcgccgcagggaaatgcggaaacgtcaactgaaataccgaaggaatttcaggctgcgccgaatagacctctttctcctctcgatacgctgctaaaagacaaggagcgcacgcttttgcttgcactcctccttttgctttacaacgaaggcggcagtgcggagcttttgttcgcgctcttttatctgcttatctgatctgaccgtcgccgcggatgatgaatttgtaggaaacgagctcattcaagcccatggggcctctggcgtgcagtttctgcgtggagatgccgatctccgcgccgagcccgagttcgccgccatccgtgaagcgcgtggacgcatttacatagactgccgccgcatcgacttgtgtcgtgaaccgctccgccgcacggaggttctcggtgacgatgcactcgctgtggccggtagaatactgcgcaatgtgcgcgatagccgcgtcaaggctgtctacgacgcgcacggctaagatataatcgaggtattccgttgcccagtccgcttcggtcgcgggtttggcttcgggcagaagttcgcatgtgcgcttatcaccgcgcagctctacatttttctctttgagcttatttgagatgacgggcagcgccgcttcggcaatgtccttgtgcaccaagatcgtttcgatggcgttgcagacggacggacgggaggttttcgcgttgaaaatgatattcgccgccatttcgatgtctgcgtctctgtcgacatacacgtggcagttgccgacgccggtctcgatgaccggtaccttggcgttttccaccacggcgcggataagccctgcgccgccgcgcggaatgagcaaatcgaggtactccgtcatgcccatgagctccacgctggacgcgcgggaggtatcctgtacaagctgaacgctgtcgcgcgggaggtcggcggattctatcgcatcgcgcagaacctcggcaatggcattattggagcggaacgcttccttgccgccgcgcagaatgacggcactgcccgccataaggcacagcgcagccgcgtcgctcgtcacgttcggacgcgcttcgtaaatgatgccgataacacccatcggcaccgtgattttttccactttaagccctttggggttcgtttcgccgcttaaaatgcggcccacggggtcgcgttgggcggatacgtcttccacgccctttgccatgccctcaatgcgggcaggcgtgagcgccaagcggtcgagcatggcttcgctcatgccgttttcttttgcggctttaaggtcttcttcgttcgcggcaagaatttctgcctgacgtgcgcgcagggcagccgcggcggcgtttaatgccgtgcgcttattttcgcccgcagtgcgcagaacggcggcggcttttttggccgcagcgcccattttttgaagttctgtcatacgcgttgtgtccctttctgtaaattacggcatgaacaccgtgccgatgtcctcgccgtcgaaaatgcggtagaggttctccggatcttcgccggagaggatatatgtcgggatatttgcacgccctgcaatctctgcggcgcgaattttcgtcgccatgccgcctgtaccgcgtgcggagcctgccccgcccgccatggcacgtacctcgtcgtcgatcttctcgatgacgctgagacgctttgcgtcggggtagaccttcgggtttttgtcgtatacgccgtcgatgtccgttaagatcatcagcacgtctgcgttgatgatgcttgcgacgatggcggaaagcgtatcgttatcgccgaaattgcgaccctcgagctcatcgaccgcaacggtatcgttttcgttgacgatcggaatgacgttcatatcgagcagctcacggaatgtattttccacgttgcggcggctgatgggctgcgaggtgacatctgccgtgagcaagacctgcgcgacgttctgatgatattcgccgaagaatttatcgtaggcaaacatcagctcgcactggccgatggcggcaagcgcctgctttttggcggtgtcgtccgggcgctccggcaatccgagcttgcccatgcccacgccaatggcgccggacgtaacgagcacgatgcgacggccgccgttttgcaggtcgcacagcgtgcggcagagcttatcgatgcggcgcaggttcattttgccgttttcgtatgtcaaggttgaggtgccgattttcaccacaacggtttttactgtatttaaatccatgattttatttgttttcaccgcaaattcgcagcaaaagcgtcctttccctattctcttttctgctccattatacatggaaacaacgcaaaaagaaagccttttgcaaaaactcaggcgttaaaaacgtctaagtcttcgccgtttacgaccttgcccgtgtagcccgcatcgcggatctcctgcaaaatgaggtcgctgcggcggcgcgtttcggcttcgacatcaatggcgttatcctgaatattcatatggtaaatgcggtggtaggtgacgagcagcttcggctgcgcttttttcgcaacctcggctaagtccgtgctgagcgtatgcacctcgcggtgatatttctgccacttcggttcgcgcgcggcaatgccggcggcatactcgacctcatgcagcagaatatcgcagtttttggccttttccgcgacgatatcgagcggggcggtatcgccgctgatgacaacggtcttcccgtcttttgttgtgaacttatagccgtagctttcgagtgtgccgtggctgacggtgaacgcctccacggtaacacgttcgtcttcgtaaataacgcccggttcaatctccgtcgcttccaccttatagccgttttcgttcgcgcgctcaaagccgtgcaggcgaaaatcgatatcgaccgcataggcagaaagcagatgctgcgccatatttcggattcccttcgggccgaagacccccagcggtttttcccgttccagcacccacggggtgaaaatgaggtccgcaaacccggcggtatggtcggtatgcaaatgcgtacagaacgcggtatcgagcagatcgggtctaagggcatcttcgccgcggcggtacgcttccgctgcgcgtcttacgacgccggggccaaaatcgacgaggtacgcatggccatcgacaacgacggcggaagccgggccgctcgcccacgggcaggcgtttggtgttcccgtaccgagtaaaacaagtttcgttttcacgtttatcatgcctttctggtttagaaaacaaaaagggacaagcctcggcttgtcccccgttatcgaacttagtgtctgtcgtttctgtcgcggcgcggacgatctccacgcgggcgatcgctgcgctcgcggcgcggctgcttctccggcaggacgttctccggcacggcaccgtcaaggtcgatcagcgcttcgcggcgggagaggttcagtctgcccttatcgtcgatttcaagcaccttgactttcacaatatcgccgacattgacgacatccgtgacgttctccgtgcgcttgatgtcgagctgagagatatgcacaaggccttccttgcccggggcaatctccacaaacgcgccgaagtccatgattctcgtcacgcggccactgtaataggagcccggctccggatcgttgacgatggtatcgatgatgtccatagcgcggcggcacttttcaatgtctatgcccgcaacatagcagtggccgtcatcctcgatatcgatggtaacgtcgcactcggcgcagatcttctgaatgaccttgccgccggagccgatgacctcgcggatcttatcgaccggcacgatggtggacagcatcttcggtgcatatttggaaagctcgggacgcggctctgcgataaccggcagcataacttcgtccagaatgtaatttcttgctttgtgcgtctttgcaaacgcttccttgatgatctccggcgtgaggccgtgaatcttcaggtccatctgaatggcggtgatgcccttcttcgtaccggcaaccttaaagtccatatcgccgaagaaatcctcaaggccctgaatatcgaccatggtcatccagcggctgccctcggtgatgaggccgcaggaaataccggcgaccggcgctttaatcggcacgcctgcgtccatcaacgccagcgtagagccgcagatggagccctgagacgtggaaccgttagaggaaagcacctcggaaaccagacggatggtatacgggaactcctcgaccggcgggataaccggcacaagtgcacgctctgccagagcgccgtgaccgacttcacgtctgcccgggcctctggagggcttcgtctcgcctacggagtaggacgggaagttgtagtggtggatgtagcgcttggactcttcgtcgtcgatgccgtcgagaagctggttgtcacgcgtggagccgagcgttgcaacggtaagcacctgcgtctggccgcgggtgaacatgccggagccgtgtacgcgcggcagcagaccgacttctgcggcaagcggacggatctcatccatacctctgccgtcaacacgcttctgctcgtcgagcagccagcggcgcacgacgaacttctgcgtcaaatacatgcactcgtcgatctttgccgcctgatcggggtaaatttcgtcgaagtgctcatgcactttttcgtaaacaggcttgagtctctcgtcgcgaacggtcttgtcgtccgtatcgagtgcggccttcacgtcatcaatggcgaaatcgcggatttcttcgaacatctccgggtccggcttattggacgggtaagagaacttctctttgccgatctccctctggatacccttgatgaactcaatgattttctggttttccgcatggcctgtcataatgccgttgaacatatcctcgtcggacacttcgtttgcaccggcttcgatcattgcgatgcgctcatcggtggaagcgacggtaacagccatctgggagagctttctctgctctgccgtcgggttgatgatgaactcgccgtcgatgaggccgacggaaacaccgctgatggggccgtcccacggaatgtcggagatggacagcgcgacgctggtgccgacgagtgcggcaatctccggggagcaatccgggtcaacggacatgacggtgcagacgatggaaacatcgttgcgcatgtccttcgggaacagcgggcggatggggcggtcgatcatacggcagacaagaatcgccttatcggtcgggcgaccctcacgctttaagaaagagcccgggatcttgccgacggagtagagcttttcctcgaagtcaacggaaagcgggaaaaagtcgatgccgtcacgcggctttgcggcagcggtggctgccacgtggatggtggtctcaccgtaacggacaaggcactcgccgtttgcaagctgtgccattttaccggtttcgatcttcagcgggcgtccggcaaattccgtttcaaatactctgaaattttcaaacataaaggttattttccttccccccgaaagccgggattttccgactccgcagaccgtttaacaattaaaccgacgcacacgtgttttacgacctgtatgcgcccgtttcactgctaaacagcccttggaatcattttgtgcagatattaaatcagctgcgcgggtcgcgcgcagctgaaaaaagacaaaaaattacttacggataccgagttctgcaatgattgctctgtaacgctcgatgtcaaccttaatgaggtagttgagaaggcttcttctctggccgaccatcttcagcaggccgcggcgggagtgatgatccttctggttggtacggaggtgctcggtgaggtcgttgattctcttggtgagaacggcgatctgaacttccggggaacccgtgtcgccctcatggcgtgcatacttcttgatgatctctgtcttttcgctcttcagcattgtgttttccaccttttctaaaatatttgccgcgctcacaggtctgggtcggtgttatccctgcggagatgtctcccaaaagggttagtccctgatccgaggacgggcactttaaaagtatagcataattcttcaaagtttgcaagcggtttttcctctgcggcgcagatttttcgttccgtacaaaatgacgaaaacgtccggcccaaaaccgactttttcacggctcttcctgccttttttgcgaaactcggacattttcgacatggtgcatcttgacaagcttttgaaatccgtatactattaaacagttaattatcgaaacgaccgtgcaaaagcaagtttacccgtgaaagactgaacacaaacgacgcgaaaaggcgttatggcgcggaagtttttccgccggagaaaggatatttttaatgagcaaaattgcagttgttaccgatacaaacagcggcatcacccgcgaggaagcgaaaaagctgggcgtttatcttctgcccatgccgttcatcgtagacggcacggagtattttgagggcgtcacctgcacgtatgagcacttctttgagatgctggaagccggtgcagaggtctccacctctcagccctcgccggaatccctcacggcgatgtgggaggaggcgctcgcgacgcacgattccgttgtgcacattccgatgtcttcggcgctgagcggctcttgcgacactgcaaaggcactcgccgcggaatacaacggccgcgtatgtgttgtggacaacaagcgcatttccatcacgcagcgcgaatccgttctggacgcgctgacgctggccgaaaagggtctgaccgctgccgaaatctgcgtgcagcttgaaaacaccgcgtataacgcgagcatttaccttgctgtaaatacactggagctcttaaaaaagagcggccgtgtgacgccggccggggcggcgctcgcgacgctgctgggcctcaagcccgttttgcagattcagggcggcaagctggacgcttacgcgaaggtgcgcggcatggcaaacgccgaaaaaacgatgctgaaggcgctcgaaaaagacctgcaaacgcgttttgcgggcaaaaaggtgcacattgcggcggcgtactccggcgacatcaagcccgcgctcgagtggcgcaagacaatacgcaagtattttgatgacaacagcattgagctttacaaactccccatcagcatttgctgccacgtcagctccggcgtaaaagcgctcggctgctttgaatattttgagtgatttttgcgtttacatacaaaaccctcgctgtgttcgtttgaagcacagcgagggttttcttatttatgttcaagcatttcaatgcttgcggcacggttatggaggctgccaagcaagcctttgaggcttaaaatgcggaaaagcagctgttcgcgctcggtgagcggcgtttgaaacgcggctttgacgtcttcggtcgttttgccgcagtaccgctcgaacgcttccggcgtgatacccagcatttcaatgagggcgtcgatgtcgtcaacgacggtttttacatcggcgtttttgccgctctgcgccaaagagaggtactccatgagccaatcgaaatacatggttccctttatgctgcccgacgcggcttccaaaagcgcatcgagcgtttcggcatcgcaatgcgtgacggttttgaatgtttcaaacccgagtcctgttttttcgcggcaggttttttcccattctttcatgtcgattggggtgagcatatttttacctctctttcttttgatgtgtcaattataacatatactttcaaaaaagtaaatatctattgacaattatttcatattatgctatattattggtgaaagaaattcacacaactctttcacaaataaatattattaaaggagtgtttttaatgttcaaaaccagaaaaaaggcaatttcactattactagtattttccttaatcttttcttctttgattttctgcaccccttatgcttccgcaaaaaacgcggacgaactaggaactgaacttaatccttacgtcttgtcacccggtgaaaaaattactgtaaccatcgacggctctaaagattctgatatatctacattagctgatgaaactttcccgagctgtattcttacaacctggtatgatggtacatattttcattggtctgtaaagcccatgtttactggtgcaaattttagtggaagcacaaatgtaatgagaaatggaattttccaaggagaggtttattttagcggattctctggacaaagaagggtgtataaagatgaaatgatacgattaagtggtacattaactcaacattttttggaacctactcatatacttcggtgttactacattcaaggctaactacacagtaaaaagaaggaagttctcacatgagaacttccttctttttacttcttttcaaacgcttcaaacagcgttcttgcggttttttcgttcaggctgatctccgctttcagcgcgtctaaatcgggaaactttttttcgtccctgacaaagctcaaaagctccagacgcagtgttctgccgtacaggtcgccgcctgtgaaatcaggcatccaggtttcagaaagcgcgtggtcggagccgacggtgggctttacgccgacattcgtcacgccgcagtaggttttgccgtccacatacacggcggaggcgtacacgccgaagcgcggcagcacgaagcgcggcgggaaattctggttaatggtcggcgtgccgatggtatgaccgatgtggttgccgtgcacgacctcaaagcagaagccgaacggtctgcccagcatggcggtgacgtcttccatctcgccgttttcaatcgctttacggatgcgcgtggcgctgacccgctcgcctttatattccactgtgggcacgacgtgcatttcgccgccgtgggcttcgcagagctttttcagccactccgtgtcgcccgccgcgaacttaccgaaacggaaatccgcgccacaggcgatgcgcttcacgttcaaaccgaagcgcagaaggtttgaaaagcgctccgcgggccactctgcgacctgtgcaaaatccggcatgatgacatactccacgccccagctttccaaaatgcgcatgcgctcctcaacggtggtgagatagcagcaggtgcctgtaaggtactccgcaggattatcccgaaacgtgaaaacaacgggtgtgagtccgctttccaccgccgtgcgaatgaccttatagtgcccgatatgcaggccgtcaaacgcgccgagcgcgaccgccgtttttttctcgccgatgaactttcgtatttcttccgtattgcgaatgacgtgcatgtgccgattccctctcatttttttgaaaatgacttaacgtatttgaattctccgttttccgcgcgagcaagtcccaagaacttctcgccgtcttcgtacagcgcgacctgcgtgccctccggcatggcgatcttcggtgcacggcagcgcgaaattgtgagtgcaccgccgtttaaatatctttgtgcctgcgccggtgtgacagacacggcagtgagcatcgaaaagagcttttccacggggcgaagaatttcatcaaagctttccccgttttctttcatcgcctttaatgtatcaagcgagacggcgtctgcgagcgtaaagccgcacgctgctgttcttctgagcgccgtcatggcaccgaccgtgccgcatttttgggcaatgtcttcgatcagcgtgcggatatacgtgcctttcgagcacgtgacgtgcagcttgccggttttttcattctcgttatattcgagcagcgtgagctccgcaatatgtacgggccgcgcttcgcgctctatttcgatgccctgccgcgcgagcttatataatctctgtccgttgacggagacagcggaatacataggcggcacctgtaaaatatcgccgcgaaaagaatccagtgcagtttcgagcgcagctcttaaaacgggggtttcatccgttttgatgacttcgccggtcacgtcgccggtggtatacgcttcgccaaaccgaaaagacgcttcgtaggtctttgcggtttccggcagaagcgacacggcttttgtagcgcggccgagcaaaagcggcagaacgcctgttgccatggggtctaatgtgcccgtgtggccgatgcgcctttcgcgcgtcaacccgcgcacgaccgccacggcgtcaaacgacgtgaagtcctgcggtttatccaaaacgatgatgccttccatgctgcctccgtattaccagcccgcctcttccacgaatttgtagaagtccttttccgcgtctttgtcttctgcgcggatggtgccgacggtctcggtataaatgatgtattcctcttcgccgtccaaatcaaacagcgtatcgcacaaattctggtcgtatgcgccgataccgcaggtgccgagatttaaagcactgcacgcaagatacaggttttcgcccacgtggcccatatcaacaagggaacctctgtggctgaaaatgccgtatcgccactcagtgcggtacggaacgaacgaccaatagaacacaacgctcgactttttcacccagtgctgatcgcacagggacttgtcgatgacgtcttcgatgttttccacctcaccgagatactcgagctgattttcgagcggcagatagtggtatttgccgggctttaagccctctacacggcgcacgagcaggtatgtttcaaacggatgtcttgcgccgccgcacggcacggtacgcagcgttgcatactttttgccgcggataccctttacgccctgcgttgcccaaagcaaaaacgaaagctccaaaagggacaggttctcttccgtataaacgcgggaggagcagcggttgaaaatgacatttaagaggtctttttcgaggccaagcggcttaaaatcgcgcggcagatcgatacgcgcatcgctcaccggcgctttcgtcagcggcggctgcggcagcattttctgctggtcggtcttgtagccctccggctcgtcacttgcatcttgctttaaaaagccacgtcggctttctgtgatggcgcgaatttcttcgggtgttaattctttcatgtgaactcctcccacctgatttacagctgaattaaattgccgattttcacttattttcgagcgctttgatggcttcgccgcaggcagctaccacgcgcgcttttacgtcttcaagctcgcccgtaagggagcagcctgccgcacctttgtgcccaccgccgccgaattcggcgcagacgacggacgcgtccgcggggttcgtggcacgcatggagaccttccaaacgcccccttcgcgctcgcgcagcgtaaagcccagcagaactccctccacctggcgcaccatggcggaaacgccgtcgagatcgtcttcggaagcgccggtctctgcgatgacgtcattcgtcaggcaaaacaccgcgcacttaccgtcacagtggaactccatgtcaccgtacaggcgtttcagcagcgctacggcagcgcggcttttggtatcaaacatcaggcggttgatctccgcggcgttcgcaccgtgctccaaaaggttcgccgcgatgcggtacgtgtttgcggaagcgttcgggtagcggaagcagcccgtatcggtggaaatgcccgtataaaggcagtccgcgatcttcggcgtgatctccgcgccgagcgccggaatcaaacgcgcgatgagctcgcatgccgcgcctgcggtgccttctacccacgtttctttggcaaacggacggcaggacgcgtggtggtcgatggcaaaatccgttttgtcgccgtagggctccaaagagccgagcagcgttttatcggccacatcaaccgtcacgatatgctccggctcgaactcgccgtattcgatgccctcaaaaaggtatgtgaatttcggcggcacggggtctgcacagcggaacatgaccgatttgccgagcgcgatgagtgcgcggctgagcgccgaagcgcagccgagcgtatcgccgtccggcgagcggtggctgaggatcaaaattttgtctgcgccgcgcaggaaatgtgcggcatcctccagatttgccataagcgtgaccaagctttcgggcgaaaatcacacccaaaagcactcctttctttgaatctttacgggaagcttattttttctcgttttcaaggtcgtgcagaatgcgcgaaatgttggcgctgtactcaatggaatccgtcgccttaaagatcatttccggcacatggcgcagctttaagcggtttccgagctcgcggcgtacatagcccgcggcgcttttaagacccttaacggcattttccgccgtctccatgccctccatggcgctgacatacactgtgcagtaggaaaggtcgtttgtgacctccacacgcaccacactcagcatgcagccgctgacgcgcggatccttgagttctcttaaaatagcggaaacctcacggcggatatcctccgtggttctgcccaatttataactcggcatcgtttattctcctttctcttccggcaggaagcgcgcggaaatgagctccgctgcaactttaaagcccgccttcagactttctgtttcgatccactcgccgcgcgtgtgctcaccggcgccgacgcaaagaccgattgccgcggcaggaatgccgtttgcaagcgggatgttgcagtctgtggagccggcatatacgcccgggcgcgtaccgaaatggttttccaccgcgtctgcgcactgtgttaaaagtgcggtctgacgcgggtcgtgattttctttgttgccgcaggggcgctcgccgagcagctctgccgtgacgtctacgccctttgctttaaattcttccagtattttctcaaaatatgccttggcatccataaggcaagcgtaatcgtccgagcgcatttcgtacagcatttccgcctgtgccgcgatgctgttgacggtcgtgccgcccgagatcgtaccgacattgaatgtcgttttcgcgctgcctgcgggaactttgtattgatagagctccgtgatgatggcagaaaggcgctcaatggcgtttacgtttccgaaatcgacaaacgagtgaccgcccgtggtcttcactgtgaccttgtagcgcagagagccgaccgccatgccgacgatgccgtcaaggtaaccgtcaaacgaaatgacctgctctatgcgcttgccgtaccgtgcgtttaaagcgcggctgccttttaagttaccgagaccctcctcgcacgagttcatgacaaatacaatgccgccgttcgttttcggcttttcgtttgcgacataagccgccataagcataagcaaagcgacgttcgcggtgtcgtcacccacagcggggcagaaccacttgccgtccttttcggtcagttcaaggggcacagactccgggaaaaccgtatcgatatgcgccatgaaaattgcgacgggcacatcgttttcggcgttatattcgtaaatgacgtttttcgcttcatcgataaaagcattttccgcgccgtggtccataagccacgctttgcagaatgcggcacgcttttcttcgtggtggctcggcgacgggattaagcacagcgtgcgcaaaagctccagcgccgtttggtgattcgcgagaacgtattcgttcaaattcatagggaatgcctttctaaagcaaagccgcgtcccgcgatggggacgcggctgaaccgacttttagtctctgtactcttccatttcgtaggcttcgaggatgtcgcccagcttgatgtcgctgaagcgctccagcgtgatgccgcagtcgtagccgtcctgcacttccttcacgtcgtccttgaagcggcgcagggaagcaatcttatcatcggcaacgatgatgccgtcacgcacaaggcgcacctgcgcgccgcgcacgatcttaccggaagtgacgtgaccgccgatgaccatgccgacattcgtgatcttgtagacctcgcggcactctgccttgccaaggaacacttcgcggtacttcggtgcgagcatgcccttcatagcggattcgatctcttcgatgcagtcataaatgatacggtagaggcgcatatcgacaccgtcgcgctttgcattttcctccgcgaccgggtccgggcggacattgaagccgacgatgatggcgttcgaggcgtttgccagcatgacgtcgctttcgctgattgcaccgaccgcgccgtgaatgacatgcacgcgcacttcgtcgttggagagcttctcgagggactgacgaacagcttcaacagagccctgcacgtcggccttgacgatgaccttgagttccttcatctcgccttccttcatctgctcgaagaggttatccagcgtaacctttgtctgggagttgaacatctcttccttctgctcggtaagacgctgctcaacgagctcacgtgccagacgctcgtcggaaacggcgttaaacgtatcgccgccgaccggcacttcgttgagacccgtgacctcaaccggcacggacgggcctgcgctctttacgcgctcgccacgctcgttcatcatggcgcgaatacggccgaccgtggtacctgcgaccacgatgtcgccggtatgcagcgtaccgttctgcacgaggacggtcgcaaccgggccgcggcccttatcgaggcgcgcctcaatgacggtgccctttgcggcacggtccgggttcgccttgagctccttcatttccgcaacgagcagaatcatttcaaggagatcatcgatacccattttggtgtgtgcggaaaccgggatgcacggcacgtcgccgccccactcttccggcacgagctcgtattcggtgagctgctgcttgacgagatccgggtttgcggccggtttatccattttgttgatggcaacgatgatggaaacgcccgctgccttagcgtggttgatggcttctaccgtctgcggcatgatgccgtcatcagctgcgacgaccagcacggcgatatccgtaaccatggcgcctcttgcacgcatggtggtgaaggcggcgtgacccggcgtatcaaggaacgtaatgtccttgccgtcgatattgacgcggtatgcgccgatgtgctgcgtgatgccgccggcttcgcccgcggtaacgtttgcgtggcggatggcgtccagaatggaggtcttgccgtggtcaacgtggcccatgacaacgacgaccggtgcgcgcggcacaaggtttgcatcgtcgtcttcgctgtcgtcaatgatgcggtcttcgatggtgacgacgacctctttttcaacctttgcgtggaactcatcggcaatgagtacggcggtatcaaaatcgatggtgtcgttgatggtagcgaaaacgccgtttgccatgagcttcttgatgacttcggcgctcgttgccttcaggcggagggcaaactcgccgacggtaatctcatccggcacggtgatggtgatggccttcgccttgcgttctgccgcgatgcggttgagtctttccgcttccgtctcgcgctttgcgctgcgcggcttgccgcggcgctggctcttctggttgatcttctgctttgcggcaacggtgtcgttcttcaccttgtcgtacgccagacggtcgtacttttcgttgtacttgtcgatgttgacgttgaccgttctggtatcgaccacgcggcggcgcggagcttcgcttgcggactcctgtgccggagtgttgttgctcggctggttgttctgcgcagaacgctgcggcttattctgctgtgcgttctggtttctgttattgccgttattgttgcggcgatcgttatttttgttgcgattattattgctattcacgttctgcttcttcggctcctgcgtgttcttagcggttttttcgctcggtttttccgctgttttctcggccggcttctcttcggtctttgccgcattgcgcgttgcaaagtacgcgtcaaagttctgtgcggcatgatcctgcgtgaagcggtcaaaaacgatatcgagctcgttttcttctaacgccgtcatgtgctttttcggctcttttacgtacttgccgaggatatccagcacttctttgttcggcacatccagatcctttgccacatcatgcactctgtatttaatcatcatatacgcatttcctctctttctccgtctgcgatgagctgcttcagtttttccgcaaatccgcggtcacacacggcaagcacaccggcctttttgccgatggctgcggaaatttcttccatgttaaacgcaggctccaaaacggatacatgatacttttccgcttcaaagcgcacgttcttcttcgttttgtccgaaaggtctgcggcaagaatcacaacgccgcacgcgccgctgcgcatggcttccacggcggtatcaaagccccagttgagctttcccgcacgtcttgcaaggcccaaagcggacagtgctctgttcatttttgcgcctcgcccgcctttcctttcacatctgtacacagctcctgatacatggcgtcatacacggcgtcttcaattttgcaggagaacgcgcgttcaaagcgccgcgccttctgtgcctttttcagacactcggggtccctgcaaacgtacgcgccgcggccgggcttgcggcctgtaaggtccaaagagacctcgccgcctgtctgcacaccgttctcatcttccttaacgggggcgcgcaccacgcgcaccagttcctttttcggcttcatttcaccgcatcccgcacacatacggagcggtattttcttttgtttcacgctgtatcacgttcctttctgcgagatgcaagtttcaaaagagcttacgcttcctcttcttcgccgaagaagccgctttccggcttaatgtcgatcttccagccggtcagcttggccgcaaggcgggcgttctggcccttgttgccgatggcgagggaaagctggctgtccggcacggtaaccttgcaaacgtgggaaccgtcctctgccgtttcaacggaaagcacggtcgccggtgcaagcgctgctgcaatgaactttgccgggtcttcactgtagtcgacaatgtccatcttctcgccgccaagctcgttgacgatgtcggaaacacgcgtgccgcgtgtaccgatgcaggcacccacagcgtctacgtccgggttatgggacataacggcgatcttcgttctggagccggcctcgcgggcaacggctttgatttctacggtgccgtcgaaaatttccggcacttccttttcaaacaggcggcggataagatccgggtgcgtgcgggagatgatggccttcgggcccttttcggtctccttaacgtctacaacgtagacctgtacgtggtcgccttccttgacgttttcggtgccgacctgctctcccttcggcaaaatggcttctgccttgccgatcttcagggacagcgcaccggtcttcgggtctacgcgctctacaagggcgctgacaagctcttgatggcgacccttgaattcctgcatcatctggtcgcgctcgctgtcacggatgccctgacggatgatgtttcttgcggtctgcgctgccacacggccaaactgttttgtatcgagacggtggcgcacaaaaccgccgatctccgcgcgcgggtcgtactgcttgacgatctcaagtgcaatctcgcggttcgggttttccacttcctctacaatctccttgcgcaggaacacgtcaaacttgccgctttccggatccatgtcgatgacaacgtcttcgttgccgtagctgttcttgcaggcggtggcaatggccttcttgatcttatcgatcatgaaatcgaccgggatgcctttttccgcttcgaggagcttcagagcctcaaacagctccttgccatcattgttcacttcttttttctgcgctgctttttttgccatttttcaaattacctgccttccggtattattctttcaaatttttgtattataaacgggagccttcccggatcagtcataatcttcgatgaggttgacgctggcacattcttttctggtgaacgtgaccgtggtgtcttcctcggtgatgacctcaaaatcgccgttttcggcaacgtcgatgaggatgccttcgagctcgcgcacgccgttttcaagcgggcgaatgagctttacgcgcaccggcgcttcaaggaaagcctcaaagtgctccgggcgggtgagcttgcggttgatgccgggcgaggagacctccaaggtatattcctgcggaatggggtcttcgctgtccagtaccgggttgatggcgtgggtgaggtctacgcagtcgtcgatgcctacgccgccttccttgtcaataaaaatgcgcagataccaatccgcgccctctttcgtgaacgtaacgtcccagattatgagcccaagctcctttgcgagcggctctgccagcgcgcgcacgatctccgtggtgctgcctttctttttctctgccatacgcagcttcctttctccgcccgcttttcggcggctgtgtctgttttggatatacaccctaatacaaacaaaagagcgggtcgccccactctttcatcatcctactatcttaccgtaaagattataccacagcgccgccttttttgcaaggagaaaaacaaagttttccgcacaaatacgggtgtgtttttacgttttggcgcggcatttttcacaggctgtttgcccctgccgcgcaaaacaacgtctgtgcgctttatttcccgaaaaacacaaaaaacggacgcgccacttttatgcggtcacgcccgtcgtttgtgttgttttattccgctgcggattcaagctcggaggtcgtgctctcttcctcatcgccctttacgggcttattctgcgcgataacttcctttgcttccagaatcttctggatatcgctcatgcgcacggagccggtcggctgatcgttcagcgtggcaacggcgcggcgttcggatgccgggtctgcgtagaacttaatctcctcgctctttctgccgtcgaagaaatcgtacttgattgtgaggatcgggtcaccctgcggttcctgaatctcctcgttcaaaacggaaacggcaagcagcatctggtagaacggctggtagtaatcgtagttgatttccttgccgtccttcgagacttccagatcgtagaatgtgttcgtctcggtggatttctcctcgttctcgatgcgggtcacgtcgtagacatccgtaccggtggacgaggtgagggtcacgcgggaaacgctcttgatgtacggcaggcgcacaaagccgtcgcgcagggaatacacttcaatattcacccaagaggtcacggcgctgtccgtgatggtgtagatcgttgtgtcgtcgtccaccatcatgctgtacaggtcgccggtcttatcgccgagcttaatgacatggtgctcatcgttcatcgtgtaatcgcacacagcgaccgggttatccagaccgtactttgcgatgtcttcttccgtagcgtgtacggcgaggacaccggcagccgtcacgttttgcagctgcttcacaaagtcgtcgatcttgccggagttcatgccggcgtagatcggctctgtgatgtcgtacgcgagcacttcgtcatcggaaagaccgaactgaatttcttccggatagttctgaccggaaaggtgcaggctgttgatttcgcttgtgctgtccgtctcggtgccgtccgtcgcagtgatggtcggcgtcggaattgcgatgagagacttattgaggaagtcgtacttagactgcttcaaatacgtggaaacgggcacgatgtacacttcgtcctcatacagcatgtaagagccggaggattcaccggctttattgccgatggtgaacgtctgggacgtgccgtccgtgtagttcatggtgatcttgtagccttcgccgctgccgaggccgtactcggagaggtcctctaccgcaccgaccttcttcgtcggcgtgatggagtataggcggtctgcaaggctctttacattcgagtagagcacgtcaaggtcgtcccagccttcaatggtgaaggtctgctcggtgtcgccgctcgaggtggtcgtttccgtcgggatgatcgtatagctgtcgtccgcggtgaggtcttcaatgccgatgttcttcacgtcttcggcggtcttatcgatcagtgcgggctccgtgctttcggaaactgtgctggaactgtttgcgtcgtcttcactgtccttcggagacgtgaggatcagcgctgcggcagccgcgcccagcacgatgagcacaacgagcgtgatgataatgtattttgtggttttcttcatggaaagcaggttcctttcttcgacttacagatgtcttcttctaaggaagatgacaaggccgatgataaggacggcaaccggcaccacaatggtgaacaggccaagaccgatggtctggatgaccgcggaggaagcgctgatatcaagtgtgttcgtttgggtctggttgacaacgaggcccacgcgggtatcggtcgtgccggtgaggttcttaatgaagtccagcgtatagtccttattgccgaaggtggagttgccgaggaaggtgccgaggtagcccatggagttgccgtctaccacaacattcgcgcaaatcttgccttgattatccatgtagcgctgtgcaagaccggtgatggtgtaggtatcggtgttcgggttttcctcaacctcctgtgtggtcgtgaggtaagcggtgtcgctcgtctccaaaatggaatacgtagcgatgtcgttgttggaggtaaacaggcgctttaccggtgctgctgcggcggcgataacgttatcatacgtgccgctgagtacatcatcggtgacgtttgcaaaaagataagccggggaagcgtcctgcgtggtgagcacgttgttcatgtcgctctcgaacagcacaccggtctgtggctcaaggccccactctgcaaggaaggacttgaggttcggcatgtctgcccagctctgggtcgggtatgccgtgacatacaacgttctggaagaagccattttctcgtcaccaagataagcttcaagcttagaaagctcttcggacgtatagtccgtggtcggcgtgccgagcacaacgatggaagcgtcttccggaatttcgtccgtcagcatgttgaactctttgacttcaaagttgttgtcgttgagcatgccggtaaacgtggaaaggttatcggaaacggtgagcatttcgttgtggcccgtcgcgaatgcgacgaccggaacggtatcgagattgacgaggtacagggcgtttgcaagtgcgccgtctaccttggagtagtagttatactggccggtggaagaatcctgctggatgctgaacaggtcggtaacggcgagcgtcttgtggcgcttatccgtcttgaccatgaccttaccggtcgtaagggagtcatcggcataatcgctgatgaactgcgggttcatgtccgggtcgatgtactcgactttgatcttgtcgttcagctcatgcagacggtctgcgaggttcgcgacctgactgtactttaagctgtaattggaatagacctcatcgccgcggatcgcgtcctcggagccgatgatgtaaatggtcgtttcgttgacgatctcctttgccacgtccgttgcttcatcgctcagggtattgaggccctctttcgtgaggtcgaagttcatggacggaaaacgcgtggtcagcgcagagaccagaacgttgatgacgataatcacggcgataaacacaaccgtgaacacaacggccaaagagccgtgcttgaatttttctttatgcaccgcggtctttactgcggaaaggttcggtttcttactcatctctatgctcctcccttagttccagcggcggctttccaccctgcgggcggtcaggaacacaaacacagccgccacgctgatgaagtacacgcagcttgaaacgctgaatatgccctgcgtgaaggtatcatatcgcgaggtgaacgagatccatgtgaggatggtgccgatgaagttgccggagagcgcagacgcaatctggtcgacgaacatcaggaaaacggcaatgacgaacgtgccgatagccgcgatgacctggctgatggtgaggccggaaatgaacacaccgatggagatcatagccgcgccgtacagcagcgtgccgatgtagttgccaaagagaatgccccacgggaacgcggaggagaaaaagcccatcgtgatggccggcagcagtgccagggtgttcgcgatgaaatacacgccgaacgccgcgaggaacttgcccataacgatgcccgtcacgctgaccggcgccgtgatgagcgcctggtcggtcttattcttgcggtcatcgctcatgctgcgcatcgtgatgatcggcataatcatcatgctgaacataaacatggtgctgaacacctgcgtgatgtacgagctggagccgatggccataacctgataatagaagaagccgtaaagcgcaagcagcgccgccacgacgacatagccgaccggggaagcgaagtacgctctcatctctcttttgaatattgctctcatttctctgcatcctccttcgtttcagcctcttcgggctcagatgcttcggtgttttcgggttctgtttccacttcaaccgcaggctctgccggagcagcgtgggaagcatcgccgcttgtaagctgcaggaagacttcctccagcgtgaggtctgtgtttctcaaagccagcagcggccagcccttgcgggtgagcagtgcaaacaggttgcggcgcaggtcgtagttcggctcgccctcgatggaaatctcgaagacgcccttttccttctcgccgagagagtaaacctccacaatgtgctccatgccgcggatggcctgcagaatttcgctttccgggccgtcaatgcgcgcaatgatgcggtgctctgcggaaaggtcgtgcgccaacgtatccgttgcgccgtccgccacaagacagccgttgttcatgacaatcacgcgctcgcacacggcctgcacttcgggcaggatgtgggaggacagaataatcgtgtggtttctgccgaggctcttgatgaggttgcggatctcgatgatctgcttcgggtcgaggccgacggtgggctcgtccagaatgagaacaggcgggttgccgagcagagcctgcgcaatgccgacacgctgcttgtagcccttagacaggttgccgatgagacgagtgtagacgttgtcaatcttcgtcagacggcagatctcgccgatatgctgcttgcggtcgagcttgacgcccttcagctcatacatgaagttgaggtactctttgaccgtcatatccatgtaaagcggcggcagctccggcaggtagccgatgagctttttcacttcgttcgggttttccagggtatttttaccctgtaccgtgaccgaaccgctcgtggcggaaaggtacccggtgatgatattcatggttgtggatttacctgcaccgttcggcccgaggaagccgacgatggtgccctcttcaaccgtgaagctgacattgttcagcgcggtatttgtaccgtagcgcttcgtgaggtttttgacctcgatcatgtttgatgaccatcctttctctgcgggacggaaatatgtacccgggaaattcccgtgcaaagtcctccccaatggcgcccgcgcagctgcgcgtcgctcgaaacggttttgaacatgcggtgaaccttttgtggaaaaagggagaccgcttccggaaccgtttagatcctctgttttgggtttccgcgcccctatgcagggcagcggaagcgcacaaattatcataccgcagttttcgccgttttgcaatagccatgccgtatttcgggcaaaaaattaagtcaacactgcataaagaacgtgctttgcgcagtgttgacttaacaaaacaaacgataactttagttatccgcattatagcggctttctgtgacggctatgtgaaaaaacaattcgcaagtatgaacaaaatgtgaactcctcacaaaccgtacactgtctgtacacacgcggtatttcaaaaaatcattcgccgcgcagcaatgcgatctcggcggggatgttctccgcgcggaacacggctgtgcctgccacggcaacgtctgcaccgttttcgcggcagatgggcgcggtttcacggttcacgccgccgtccacctctaagatgagctccgggcgctttgcacgcagcgcgcgcagcttctccatttgatcagccatgaacttctggccgccgaagcccggctccaccgtcatgacgagcaccatataaaggcggtcgaggtacgggtacaggcactcaacgggcgtgcccggctttaaagacaacgccggctttacgccgtacttttcaatttcggtaatggtttcatcaatgtcgtcgtcgcactccacatggaacgtgatgatctctgcgccggcctccgcaaactggcggatatactgcttcgggtgcgagatcatgaggtgcacgtcaaacgtaaggtcgcttaacggacgcagtgccttgacgacatccgggccaaagctgatgttcggcacgaaatgaccgtccataatatcgaggtgcagccaatcggccgcgctgacggactttgcgcactcgcccatgcgggtaaagtcgcttgcgagcatagaaggtgcaattttcatttttaccacttctttctacgagaagaaatttacggattttgcggttaaaagttatctttttcgtcgtccttttcctgcattttattcatggcggcttccgctttccagcctctgcggttcagaataaagaacacgattgccagcacaacgagaacgatgaacgtgagcacttttaatacggcgcccggtgtgccctgaaacactttccaatccgggaaaagcgaatccaaaagccaccacacgccaagcacaaggaaaaatccgcctgcaacgtagaatatcttattctctttcgacagacggaaaatcaagatcagtcctgcaataagccacatggcagcatatacataacccatggtatcctatcctttctaaagacatacgccttatcttctctttgttgacctgctttattatagcggatagtgctccaaaatacaaggaaatccgcagaaaatacacaaaatatcggaattctcacattttataaccgaaaatttttccttcttctccttttgcggagtaatgaagaatttacgctccccgcaaaacgcaaaaaggctgccggcaaaagccgacagccaatttcactgattatattgagatcagatcagctcaatgatcgccatctcagctgcgtcgccgcggcgcggcccgagcttcgtgatgcgggtgtagccgccgttacggtcagcatacttcggagcgatttccttgaacagcttgttcgtgacgctttccttggtgatgaaagccatgacgtttcttctgtttgcaagggtatcttccttcgcgattgtgatcatcttttcagcaagagcgcggacttcctgtgctcttgttgcagttgtctcgatctttccgttctcgaagaagaacgtaacgaggccgcgcagcatagccagtctatgtgcagtgtctcttccgagttttcttgttcccggcatgattgtcactcctatcgtttggtaatggtaattaaattattcatcgtccttgcggaggctgtagccgagctgcgcaagcttccagatgacttcttcaagcgacttgcggcccaggtttctgaccttcatcatgtcttcttcggactttgaaacaaggtcttccaccgtgttgatgccggcgcgctttaagcagttgaaggaacggacggaaaggtccagctcttcaatcgtcatcttgagcacctgtgcatcatcgctgccgctcttctctacgatggtatccatcgccttacccttttcggaaaggtcaacgaagaggttcagctggtctgtaaggatcttggcagcgagcgacaccgcctcttgtgcggtaataactccgtttgtccatacctcaagggtcagcttgtcgaaatcgatgcgctggcctacacgggcaggctctacgttaaagttaacctttaacaccggtgtgtaaatagaatcaactgccaattcaccgatcacgccctgcggcatattctgcttgttgcgttcaccggaaacatagccgcggccctcatcgagcacgatctccatgtacagctttgcgccttcaccaagcgttgcaatgtgcaggtccgggttcaggatctctacttcgctgtcgcacttgatggaatctgccgttacgatgcaggggccttcagcagaaatctccacggttttcgggccttcgcagtgcaacttggcaatgagacccttgatgttcagaacgatttcggtgacatcttccttaacacccggaatggtggagaactcgtgtacgacgccgtcgatcttgatcgacttcggggctacacccggcaggctggaaagaagcacacggcgcaggctgttgcccagcgtagtgccgaagccgcgctccagcggctctaccataaaccggccgtaagtgttatcgttggataattcctcggtctctattctcggtctttgtatcatctcaatcatttgcgatcctcctttacacatttgacgtaattcgtaaaacccataaaataatgttaagttttactggattacttggagtacaactcaacgatgagatgctcttctacctcaaattcaatgtcgctgcgctccggcatgcgaaggatcttgccctcaagggcttccttgttgcgctccatccactcgggagtggtgacgagcggtgcgtctgcgccggtgagcttggagaacttcacgctgctacggctagcttcacgcacagcaatgacgtcgcccggcttcacaaggtaagacggaatgttgaccttcttgccgttcacggtgaagtgaccgtggttgacaagctggcgtgcgtcgcggcgggtggaagcaaagccgagacggaacacgacgttatcgagacgacgctccagcagacgaagcaggttttcgcccgtcatgccggtctgacgctcagccatatcaaaatagcttgcaaactggtgctccagaacgccgtaaataaacttcagtttctgcttctccttgagctgagttgcatattcagactgctttctgcgcataccgttgcccggattgcggatggtggtcttcttgctgtaacccataacggccggagaaatgcccagcgctttgcagcgctttgcaatgggctgtctgttcttagccatattctgtaacctcctaatctgttatacgcgtcttctcttcggcgggcggcatccgttgtgcgggatcggcgttacgtctttgatcatgctgacctcaagacctgccgactgcagtgcacggatagcggcttcacggcctgcgcccgggcccttaacatagacttctacgctcttcatgccatgctccatagcaatcttagccgcggtctccgcagcggtctgtgctgcgaacggcgtggactttctggaaccacggaaaccgagttcgccggcgcttgcccaggataccgcattgccctgcgtatcagtgatggttacgatcgtgttgttgaaggtggactggatatgtgcagcgccacgctcaatattcttgcgctcacggcgtctgcggactgcggttactgctttctttccgccttttgtagctgccatttaaaatccctcccgattacttcttcttgttggccatggtctttctcggacccttgcgcgttcttgcgttggtcttagagcgctggcctcttaccggcaggcccttgcggtgacggacaccgcggtagcagccgatttcaacgagtctcttgatatcgaacgcaacattacggcggaggtcgccctcaacggtgtagtggtggtcgatatattctctcaactttgtagcgtcatcttcagaaagatctcttacgcggatgtccggatcaacgcccgtagcagcgcagatgtccgacgctgtcttgcggccgatgccgaagatgtaggtaagagcaatctcgattcttttgtctctgggtaaatcaataccagcaatacgagccatgcttattgcacctccataaatatttcagagcctcagccctggcgctgcttgtgcttcgggttttcacagatgaccatgactttacccttgcgcttgatgatcttgcatttttcacacatcttcttaacagaaggtctgactttcatttgtgtgccctccttatgcgttgtggggtcttcaaatctattttatcttacttggaacgccacgtaatgcgtccctttgtcagatcgtacgggctcatttccagtgtgaccttatcgcccggaaggatgcggatgaaattcatgcgcagcttgccggagatgtgagccaggatcatatgcccgcctgggatctctacctggaacgtcgcgttcggcagagcttcctttacgattccttctacttcaattacgtcctgctttgacattcttgtctcaccaatccttacatttaaatgttacgttgtgtgcgctctgtatgctgtgagcgccgtgcgtatttgtcgattggtcgaaaggctctcttcgctgagcaccgtcgccgtcggggctaaatgcatcagctttttctttttcggtgcttccatcctgcgacgtttgccgtctgccatgtaggcatacacgccgtccgttttcagcaccacctgaaaatcgcctttatcatgacctttaagcgaccgcataatctgtccgcgtacacagtccatctgacacctcaatccagtgatgtgagaatcacagggccgtcgggtgtaatggctatactgtgttcaaagtgggcggcaagcttgccgtccttcgtcacggtggtccagccgtctttgagaattttaacctcgcagctgccctgcgtgaccatgggctcgatcgcgatcgtcatgcccggtaacaggcgtacacccctgccgggggtgccgtaatttggaacactggggtcttcatgcagcttcgcacctacgccgtggccgacaaattcccgtaccaccgagtaattgcgagcttcgacatactgctgcactgcggagccgatatcgccgatgcggttgcccggcacagccttttcaatcgcaaggaacaggctctctcgggtcgcatccatcagcttctgtgcttcttcggaaactttgccgcacgggaaggtccatgcgttgtctccgttgaatccctcatagattgcgccaacgtcaatggaaacgatatcgccctctttgagaatttcgtgtgctgaaggtatgccgtggataaccacattatttaccgaaatgcaggcgctcgccggaaaaccgccataaccgagaaagctgggcacggcgcccgccttctcgattgttcttctgacgatcttgtccagttcgagtgtagaaacacccggacggaccgcttcaccggccttcagcaatgcttcctgcgaaatctttcccgcgtcacgcatataacgcagttcacgggtcgttttcaggttaatcatgcttacgcctctaatgctttgagtgtgagggcggtcgtatcggcgacctcctcctgaccttctacgatgtgcagcttgccctgcttctcgtagtattcctttaagggctcggtctgctcgtgatagacgcgcaggcggtccttaacggtatccgggtggtcatccttgcgctgaacaagggtgccgccgcagttcgtgcagacgccttccactgccggcttcttgtaaagcaggtggtaggaagagccgcacttttcgcagacacggcgtccggacattctcgtgacgatcttctcgtcgggcacttcgatatcgatgacccgatcgatcacaacgccggaagcgtccagagcctcggcctgcggaatggttctcgggaaaccgtcgaggataaaaccgtttttgcagtcttcctctgccagacggtccttgatgataccgatgacgatctcatccgggacaagctggccggcatccataaaggctttcgccttgaggcccatttccgtgccgcttttcagcgcctctctcagaatattgcccgtagaaatggcgggtattccgagatgtttgcagataacttctgcctgggtgcctttaccggcacccggtgcacctaaaaggatcagcttcattgttcatgactcctttcgtatcttatgcgcccgggggcttaatcaaggaagcccttgtagtgacgcatcatcatctgagattcgatctgctttacagtctccagcgcaacgccgaccatgatgatgacggacgtgccgcccatggaaaggccatacatgccggtgaggttgctgtaaaggatcggcaggatcgcaacgaacgcgaggaagatcgcgccgatgagcgttatcttggaaaggatcttgctgatgaactccgccgtcggacggcccggacggatgccggggatcgtaccgttattggtgcggaggttgttcgccatttcaatcgggttgtactggatcgtcatgtagaagtaagcaaacacaacgatgagcagcaggtacagaacactgtacagccagccggtggaggagaaggcattgaagaagcccttccagaagccggtcggttcgccgacaaagaggcgaatggtgctcggaatggagaggatcgcagacgcgaagatgaccggcataacaccgctcatggtcactttgatcggcaggaacgtgctctgaccgccgtaaacctttctgccaacgaccttcttagcatactgcaccggaatgcggcgctcggaatcgttcatgaaaacgatgacccaaatgaccgcgaggaaaaggatgatgaacagcggtgcaaagacaaagtacttaccgtagctctccggagactgcattgcagccgagaagtagctccagatctgacccatcgtaaccggaagacgtgcgacgataccggcaaacaagatgatggaaatgccgttgcctacgcccttctggttgatctgctcacccatccacatgatcagcgccgtgccggcggtgaacgtgagaacaataatgattgcagtaaatactgcggagaaaccttccttgtacagggtaatgttattgtttctcaggtagaaataataagcggtaccctgaatgaggccgagacccaccgtggtgtatctcgtaatggcagcaattttctttctgccttcttcgccttccttcgccatgcgctccaaggcgggaatcgccaccgtgaggagctgaatgatgatggaagagttgatgtacggggtgatacccattgcaaacagcgttgcatttgcgaacgcgccgcccgttaacatattgatataacccagtgcagtttcattggcgcttgccatcagcgtgttgagcgcggaaacgttcaggaacggtaccggcacaacagagccgaaacggaaagcaatgatgatcaaaagcgtatacaggagtttcttacggagatccgggatcctccaagcgtttttgagtgtattaaacacttagatcacctcggccttcccacctgcagcctcaattttcgccttggctgcttcggagaaagcgttagccttaacggtaacctttttggtcagcgcgccattggaaagaaccttaacaccgtcgcatgcagacttgatgatgcctgcttcaacgagtgctgcctgatcgacgactgcgccgtcttcaaaggcgttgagggcgttcaggttgatcgcaacgatctccttagcgaagatattgttgaaacctctcttcgggattcttctctgcagcggcatctgaccgccttcaaaaccggggcggaaaccgtggcccgctcttgccttctgacctttgtggcccttaccggctgttttaccgttgccggagccatgacctctgccgatgcgctttgcgtcctgcattgcgcccggggtagctctgagttcattgagcttcattcaaacacacctccttagcctttgataacctcgaccaaatgaatgatcttcttgattttgccctctgtttgtgcattatcgggctgagtggttgtatcgccgaccttatgcaggccgagcgcctcggcggttgcaatctggggctttttgcagccgatgaggctctttttcaacgtaatctttacgtctgccatattgcaaacctccttacagaatttcacttacggacttgccgcgaacagctgcaacctcttctgcggttctcagctcggagagaccggcgagagttgcgcgtacaacgttacacgggttgttggaacgcagtgcctttgtacggatgtccttgatgccaacgctttcaacaacggcacgaaccgggccgcctgcgataacgccggtaccgggtgctgccggctttaagagaacacggcctgcgccgaattcgccgacgatctcgtgcgggatggtggagccgcgcagagcaaccttctgcaggttcttcttagcgtcttcaatgcccttgcggatcgcgtccggaacttcgccggacttgccgatgccaaagcctacgatgccgttgccgtcaccgacaacaacaagagcggcaaacttaaagatacggccgcctttaacggtcttggaaacgcggttgatagcaactacgcgctccttcagatcgagtgtggatgcgtcaattttcatagccaaaacaatattcctccttcttagaagttgaggccgccctcgcgggcgccgtcggccagctctttgacgcggccgtggaagatatagccgccgcggtcgaagaccacatcggtgatacccttttctgctgctctttctgcgatcagcttgcctactgcgtgtgctgcttctttgtttccgccgttgccggtaaacgccttctcaaccgaggatgctgcgcacagtgtaacaccgttcacatcatcgatgatctgagcgtaaatatgcatattggagcggaaaacatcgaggcgcggtctttccggtgtgccgctgatcttgccgcgaactctcttgtggcggcgcagtctggctacgttcttatctgccttactaaccatttttatctcactcctaacctattatttacccttaccggtcttgccttccttgcggcgaacaacctcatcaatgtacttgatgcccttgcccttgtacggctccggcggtctcttctcgcggacttccgctgcgaactggccgaccttctgcttgtcgatgccattgatgatgatcttgttcggagccggaacgtcgatcttgatctcgtccgtttccggaacgatgacctgatgcgagaaaccgaggttcataaccaggtttgtgccctgcttctgaacacggtagccaacaccgttgacttcgagctctttcttaaagccttccgttacacccacgatcatgttgtggataagggtacgggtgaggccgtgcagagaacggttctctttgtcgtcgttcggacgtgtaacaacaatctcagcgccctccacagcgatgttcatgctcggctggaacttctgagtcagcgtgcccttcgggcccttgaccgttacgcagctaccgtctaccttaacctcgacgcctgcgggaatatttatcggttttcttccaattctggacatgttattgcacctccctgattaccaaatgaacgcgagaacttcgccgccgatgttcatctttcttgcctcgcggtcggtcataacgcccttagaggtggagatgacggcggtgccgaggcccttcatgaccttcggcagctctgctgcgttggaatagatgcggagacccggcttggagactctcttgaggcccttgattgccggcacgccgccttcaacatacttcagtgttacggtgatgacgccctgtttgccgtcctcggtaaccgtaaagctcttgacataaccttcgtcaacaagaatctggcaaatagccttcttcatgttagaagcagggatgtcaacagtgtcatgcttcgcagactgagcgttgcggatacgggtaagcaggtcagcgattgtatctgtaatctgcatgatttattaacctcctataaagcttttaccagcttgctttcttaacacccgggatctggcccttataagccagctcacggaagcagatacggcagatgccgaacttgcgaaggtaggcatgcggcctgccacagatcttgcatctgttatattcgcgcgtagagaacttctgctctctctgctgcttgagtttcattgaagtcttggccacagtattccctccttacttttcaaacggagcgcccatgagcttcaggagctcgcggccctcttcatcggtatttgccgtcgtaacgaagcacacatccatgccgcggaccttgtcgatcttatcgtactcgatctcagggaagatgagctgctctttgatacccaggctgtaattgcctctgccgtcgaaggagttggggttgatgccgcggaagtcacgcacgcgcggaagcgctacgttgaacaggcggtccatgaactcccacatcttctcgccgcgcagcgttaccttaacgccgatcggcatgccttcacggagcttgaagtttgcaacggacttcttagctctgcaaacgatgggcttctggccggtgatcatcgcgaggtcgccggaaatggaatcgatgaccttcgcgttgtcttttgcctcgccggcgccgacattgatcacaattttatcgagcttcgggatctgcataacgctcttgtagccgaacttcgtcatgagagcgggtgcgacctctgctttgtaaaaatcattcagtcttgccattttattccctccagattaaagcgactcgccgcattttttgcaaatgcgctcttttgtgccatcctcaagcactttgtgggtgacacgggtcggcttgccgcagcgggggcaaacaacctggaccttgcaggcgtagatcgcggactctgccttgatgatgccgccggcctcgcccatcttgcggggctttacgtgcttagagacaatgttggcattctctacgatgaccttgccctctttcggggaaacagccatgatcttgcccttcttgccgcggtctttaccgctgaggataacgacggtgtcaccggttttaacatgaactttactcatttcaggacacctccaattaaagaacttccggggcgagggacagaatcttcatgtattccttgtcgcgcagttcgcgagcgaccggcccgaagatacgtgtgcctctggggtttttatcatcacggatgatgacggctgcgttttcgtcgaaacgaatgtaggtgccgtcttcgcggcgaacgccggatgcggatcttacgataaccgccttaactacgtcgcccttcttaacaactccgccgggtgctgcttttttaacagatgctaccacgacgtcgccgatatttgcatacctccggcctgtaccaccgagaacgcggatgcacataagctccttcgctcctgtgttgtcggccaccttgaggtaagtctgctgctgaatcacagtaaattcctccttctgctaaagccgattatttggctttctcgataatctcaaccaggcgccatctcttatccttagagaggggacgagtttccataatacgcactctgtcgccgatgccgcagacgttctcttcgtcatgggcttttctcttaacggtacgcttgatgatcttgttgtaaagcggatgtctgtaactgtcctcaacagcaacaacgattgtcttatccatcttattgctgacgaccttgccgacagttgtctttctcatgtttctttcgctcacgtctaatcctcccttcccttatgcgttctctttgctaagctcattcgcacggataactgtcttaacacgagcgatgtccttcttaaccgccgagatgcgcatcgggttttcgagctggttaatagcgagctggaatctgaggttaaagagctcagccttgaggtcattcagttttgtgttcagctcttctgctgtgagctgtctgatttcagaagctttcattactcttagccctcctcttttgctacaaacttgcacttaatcggaagcttgttgcttgcaaggcgaagtgcctcacgtgcagtctcttccgaaacaccgccgagctcgaacataactctgccgggcttaacgacagctacccagtactccggggaacctttaccggaacccattcgggtttcagccggcttctgtgtgatcggcttgtccgggaaaattttgatccaaactttaccgaaacgcttgcagtaacgcgtcatagcaacacgggctgcttcgatctggttggaggtgatccatgcgggctcaagagcctgaaggccgaagtcgccgtatgtcaccttattgccgcgatatgccttaccggtcaggcgacctctgtgcactctgcggtatttaactctcttaggcagtaacattacgcacgtcctccttctctcttattgtttctgcgggtgttgttgctctcgttgagcacttcgcccttgtacagccaaaccttaacgccgatgcggccgtaggtggtagctgcttctgcaaagccgtaatcgatgtccgcacggatggtctgcagcggaatggtaccgtcatgatactgctcgcttcttgcgatttccgcaccgttcaaacggccggagcacatgattttgataccctttgcgccgagcttcatggagcggccgatgcactgcttcatcgcacgtctgaatgcgattctcttttcgagctgctgtgcaacgttctctgctacgagctgtgcgtcgaggtccgggcgcttaacttcaacaatgttgatgacgaccggcttgccgagctgcttctcgcactgtgcgcggagcttctcgatttctgcgccgcccttaccgatgaccataccgggctttgcgcagtgaatgtgaatgcgaaccttggaggcatcgcgctcaatttcaatcttcggaacacctgcgaggtagagctgcttcttcagcgttttgcggaggttgtagtcctcaacgagcgtatcgccgaaatcagctttctttgcgaaccagcgggaatcccagtctttgatgacgcccacgcgtaagccgtggggattaactttctgacccatttatgtgacctcctcgcttattccttctctttcacaacgagtgtgacatgagaggttctcttcaaaattctgtaagctcttccctgagctctcgggcggattctcttgagcatcggacccgggcaaacgtagcactcggaaacatagaggttgtttctgtccatgttgaagttgttctctgcgtttgcgatcgcgctcttgaggagcttctcgagatcttcgcacgccgccttcggggtgtgcttcaggattgccattgcgaggtcaacgggcttgtttctgatgaggtccagaacgatctcaaccttgcggggagaaattcgggtatacttcagaactgcttttgcttccatcttatactctcctttctcttagcggctggtcttggaaccggcgtgacccttgaaggtgcgggtcggggcgaactcgccgagcttgtgaccgaccatatcttctgtcacgtaaaccggaacgtgcttgcggccgtcatggacggcgattgtgtgaccgacgaaatccgggaagatcatggaagcgcggctccatgtcttgacgatcttcttttcgccgttctcattcattgcctgaatccttttaagcagtgcgggctgacaaaaaggacccttttttaagcttctgctcatgttcttttaagctcctttccgtgccttacttaccgtttctgcgcttaacgatgaacttgttgcttgccttcttcttggaacgagtcttataaccaagagccggcttgccccacggtgtaaccgggcccgggcgaccaacagggctcttgccctcaccgccgccgtgcgggtggtcattcgggttcatgacggaacctctgacggtcggtctccaacccatgtttctcttacggccggccttaccgatcttcacgttctcgtggtcgatattggaaacctggccgacggttgccatgcaggcatccggaacatttctcagctcgccggacgggagtctcagcagagccatgccgttttccttagccatcagctgagccatgatgccggctgcacgggcaagctgtgcgcccttgccgggataaagctcaacgttgtggacaaaggtaccggtggggatatttgcgagcggcagtgcgttgccgggcttaatatctgcatccttaccggagaatacctgatcgccgaccttcaggccgttcggtgcgatgatgtatctcttctcgccgtcttcgtactgcacgagtgcgatgaaagcggaacggttcgggtcgtactcgagggtaaggaccgtagcagccatgtcgttcttctggcgcttgaagtcgatcacacggtacttcttgcggttgccgccgcctctgtggcgaacggtgattctgccgtagctgttgcggccggcagctttattcttcggagccagcaggctcttctccggacccgtcttgctcaatgcgctgaagtccgtggtggacatgttgcggcgagcattcgtagtcggcttatagttaatgattgccattgtgtttcactccttgtttggctttgcgggatcgggcaaattcccattcatgcccttggggttcgaattactcgagccgaattaaaccatggactcgaagaactcgatggacttgctgccctcggtgagggttacaacagcctttttccaagctctggtgtagccttcatatctgccctggcggcggaacttgccgcgaacgttcagggtgttgaccttctgaaccttgacgccgaacagctcttcaaccgccttagcgatttcaatcttgtttgcatcctggcagacttcaaatgtgtacttcttattcgcaacgccggtcatggatttctccgtgatgatggggcgaatgacgatgtcctgcgctttcattatgcgtacacctcctcaattttggagacggcatcctttacaacgatgaacttgtccgcgttgaggatgtcatatacgttcagcgtgttgacctgtgcggtcttaacgcccgggatgttcgctgcggaagcgatgacctgtgcatcgacctcggagagaacgatgagcgccttcttctcgctgccgagcgccttgagcatctcagcaatcttcttcgtcttgtaaccctcggttgcgatggaatcgacaacgatcatttcgttatcctggaccttgctggagagtgcggacttcatagcgagacgcttcaccttcttgttgagggtgacggtgtaatctctcggcttcggtgcgaacacgatgccgccgtgtgtccactgcggagctctggtggagccctgtcttgcacggcctgtgcccttctgtctccacggctttctgccgccgccggaaacttcggaacgggtgagggcggactgtgtgccctgtctctggtttgcgagatacgccttgaccatatcattcatgacggaaacgttcggctcaataccgaaaacgccttctgcaagctcgatcttttcgacctctttgcctgccatgttcaaaactgctactgtaggcattctttattcctccttcccttacgctttcacgctgtcgcgcagaacaacggtgccgccgttcgggcccggaatagcgcccttaactgcgatgagattgttttctgcgtctaccttgacaacagcgaggttctggactgtgaccttctctgcgccgaggtgaccagccatcttcaggcccttccaaactctggacgggctggagcaagcaccgttggaaccgccgtggcgtgcaaccgggccggaaccgtgggtctctttaagtctctggaagttccagcgcttgatgacgccggcgtaacccttacctttgctggtgcccgttacgtcaaccttgtcgccgtttgcgaacacgtcagccttgatgaggtcgcctacgttgtaagcgccgcaatcgctgaatctgaattccttcagggtcttcttcggggcaacgtcgcccttcttgaagtggccggtgagcggcttgctcacgcgctgcggcttctgatcgccgaagccaacctgaactgcatcgtagccgtcgttttcaacagtcttcttctgtgtgacaacacacggaccggcttcaacaactgttacgggcacgactctgcccttttcgtcgaagatctgcgtcatgccgatcttcttgccgatgattgctttctgcattttgtatcctcctttaggttattggtcggatctctccgacatgaccctcctgcctgtaggttgagcggttatctgtcgaacgaaatcagagcttgatttcgatctcaacaccggcggggagctctaagcccatcaacgcctcaacggttttgttgctgggtctcaggatgtcgataagtctcttatgggttctcatctcgaactgctcacggctgtccttgtacttatgaacagcgcgcagaatcgtgacgatctgcttctctgtcggcagcggtaccgggccggaaactcttgcgcccgtgcgctttgcggtctgcacgatcttttcagctgcctgatcgacaacctgatgatcgtaacccttaattctaatcctgatcttttctttgactgccacttaaatcgcctcctgttaaattttagttggcgggcgggggtttttatgaacactggcccgggtgtttcaccaagaagccatataaaaaccggatattcacttttgtgaaatccgggatgcttttgggtcggtgtaaaatcacaaaaccctcataaaaaaaccattgatctgcctttttgtccggcctgtgcgccttagaaatcaacgcatggttccgcgcgccactcccgtaggagccgctcagcgtatcaaattgtgtcgcccggtttgaaatcggacatactccacggaaaaaccggcatgtctcagccgcaacctcccgcttcatcgcatatctgtcgcagtcacgcaagtattattataacaggcaaagtatgaaattgcaaccccttttttcgaaaaatttttcagcttttctgcggctttttccgttttttcaatttgcgccgtatcttgtgctttcacccgcgcggcatacaaccgacgaagcaaaaaacgggacggcccgaccgccccgtctttctttttatcgcacactttctatgcatctacaggctctacgcgcaggaaatccatcgtttccgccggctcacgcccgtctgcagagaacacgaactgcttatcctgcccatcgtccatgacttcgaaaaaggcggtcgtgccgtcggcaccgtacacaaagcgcagcgtctcaattgcgtttgacgcgggatcataccagccgccgtccgcatggcggatcggcccgtccggaaacgtcagctcccacaggcaatccaccggctcgtagattttcgttccctgcgccgtctccaccgtaaacgacgcccgcagctccgtcctacgcaggaaccggcacagccgccagcccttggcctccagcgcggcgggctccgccgccgtactgtcctccacccgcacgccggagagggaaatatggaacggcaggggcagcggcataagccagagcacaagcgcgagcagcacgatgcccacgcagacccgcccgataattttccggtttaatttcttcacagtaatactcctatcataagaaactagcggtttaatgtacgggtaatcttcacttccgatccatatctataccgcaccggacctgttgtatcctatccattattgtcaacagttcattaatatttttgaaatattatttaaccccccttgataacatgtctcttgttatcaaggggggtaactttatttaccagcctgcgcgcacaacgtagacgatcatatcgcgtctgccgaatgcggtgcagtcttccagcgtatcgtagtaaaggtctgccacgatgtcgccgcacatggccgctccgccggtgtccatggcgtagcagtagccatatgtccacgagccgtccaccgcggtgatgtacagcagcgaaccgtacgggatgcggtttgggtctacggcgacataaccgacctgcggtgtagcgccgatggatgtgacggcgcctgccggtgcatagtacgcagtgcaggaacccgtaaggctatactcaaaggaggacggtgcgccggaagcatctgtgaagacgttctgcttctcttttgtaccgcgcagcacgaccgcgctcttcgcttcctttaaaacttctttcgtcttggcgacgcggctttcttcctcgccgtccgcatacgtgaccgtgtaggtaactttggcttcgccttccacgccctcggtcttcgtctccgtttcgccctcatagagctcttcggtatcttcgtataccgtgctgtacgcaacagcttcgttctcgataacctcttcggtgcggatgcgcacaacgcggatcacatcgccgctcgatacgttatcctctgccttcacctgcttttcaccctctgcggtcgcgaccagaatgcggtcgttctcgccgagcgtaatgcccatggcttctacggcatcactgtaattttcagcggcaacgctcttctcggtcgttttgccgtctgccgtaacggtgaggtcaaggtaacgctgcacgcggatgcgcataccgtttgtaagtgcggtatccatggccggtgtgacggtgtcgttttcgccgagcgtgatgccggcggctttcagcgcgtcttctacggtgccctcgttgaggtcttccatgcggcgcttgccgtctgccgaaacaaacacacgctttgcacgggtgatctgcacggcgatgtctgccgtaagcgcggcggtgagatcggcatctgccgtatctcttgcgccgagcgtaatctcgttttccgcaaacacgtcggaaagcgttttgcctttcggggctaaaatcatctgggaggcgttatcctccttgacggaaacgcgcacaaagcgctgcacggtgagcgtgccgttctccggggagaagtcgtaggtatcgatatccgaaacgggcgccatgccctcggtctgtgcgcgggaaagaatatcctgcgggttctgaccgatcatactgaatctgtatgtttcggagccgtcatatacggtgatatcggcggtatttgccataaccgtaacaacggaagagatgctgagcgctgcaaccagaacgacgatcagaaggatcttcggcatcaggctcttttgctgttttctaacatgccgcatagctcttgctcctttcaaaaaactgtgaagcgttttgcgcttcgatttggcaaagcttcggcggccaccccgccctcttgctttgcgtccactaccttttctgacctttgaaatacgggtacaaaatgccctttccaaaagtcatttgagagtataatgtgaaaatgatagtctgtcaagtttttcgaaaggttatttttgtgcaatatgctgagttacgcatggcgttttaatttacataacaactcatttgatatttttgaaagcgattatttgccttttttacggaacttttttgcggcgctctgtgcaatttgcaaaaattttgcaaaagcaaaaacatcgaacaaattttcttatgccttaatattgtatattcttgcatatccatttcgatgaatttcgcgaactttctgtgttttcccgttttatatcgtatattgttccgaatttaatacattccatgtgctgtgcggcacttttcctttacagcagaaattttcaaaaaaccgcggtcaaaaggcaggtatatttcataaaaagcgtgcggtattttgggcagctctccgaaaaaatcgcatgtgcggcttttggaagcgggatgtccgtttcaatcgggccgattttgtgtcgaaatgcgtctcaccgtgtccgcagaaaaaattatcgtcaaccgatgtatagaatacacatgttaagtttacataacccgcgttttacatagagttttgtttccgtgccgcgcacgtttttaatttgcttcttatatataatagaacatcacgggcagctttttagggccgaccgtgatgctttatctcatgcgttctgtttctttatataagcaataagctcgtttgccgcggtgcggtgtgcgcccacaccggggtggtcacggcagccgcgatttttgaggtcatccgtcagcgacagaaattccgcgttcgtgtcgcccgtttccgctttgtaatcgtctatggccttttgcagcgccgggacaagctccaagccgagcataccgtagatccacacaagacgggcgttggggtaatacccacgcaattgctttaaaaacgcggtcacgccgtgcgcaaaacgcgcttcgtcttcggggttcagcttaccgtcttccgtacggcggttctgaaacgtctcgccggttgtttcatctgtccaggcaggctgtgaaaacgcgccgcagtcgtttgtaccgaggttgatgaagacgtaattcggctgccattttgtgaaatcatacggctctttcgcgccgagggcaatgtttttttcgccgctcaaaaggccgcaaagctgcccgtagatgggcggaatggcactgtttgggtcgttgttccagccacagcacacgccccagccactctgcgatgagacacggatatcggcgtttaaagcacgggacaccatgacagcgtagttattctccgcactgaagaacatggaaatccagtctgtttccgctttcgcgccgatgtcgccctcgccgctcgtgatactgtcgccgatgaattcgatctttaaattgcgctccggcacgggcaggaattcgccgtctgtttcgatggcgttaatctgcaaaacactctccgggtcggcgttcatggcctgcgtatctttaaagatgcgcacgttcttgaccttttcggggtccatgccgcggaacacgcacacgcgctccgtgcccttttgcgccatgcggcgggagaagaactcgccattcaccataaagctgtaccacggctcgtggatgtcccaatccgccgtaaattccacccacagctcgctgccgcgcacattaagctctaagcccgccgccgtccagaacagcgtgagcggcgttaacgagccgtttgtgcgcccgtgcacaaggtgcggaacttcgggtaaggtatatcgcttgacttcgctcattttgcctccgcctcggcaagctccttcttataaagatacttgtcaatgtcttccttgatgttgtccggaatcttcttttccaccgggaacaccgccgcattgatcagcgtatcggcatacgtgagcacaatctccagcgttttgccgagtgcctctgcggaaaggaactccatggtatcaaaacggttgtggatatacgccgcaccttttgcaccgtcgcgggagaagttgattgccggaatgccgttatccgcaaacgggatggaatcggaagaataaatgctctggcgcgtcacagcggagaggccgttgattttgagcatgtaatcggtgtagtgtacgagggattcctcgcctgtgacagccgccgtgttatagccgaggatcggcgcaccgacgtcaacgttaatcatgaagacgtgatctttcagctcatccttgtggtcgcgcacgaatgccttgctgccctcgaggccgatctcttcactgccgtaccagcagaactttacggtacgcttcggcgggtgctgcgcgaaccaacgcgccgcttccatgttgatgacggagcctgcgccgttatcgtatacgcctttggaaaattcaacggagtcataatgtgcgccgaaggagataatctgctccggatgctcggtgcctttgatttccgcaatcacattgtgcgacgtgagtgtaaggttcttgttctgtacagtaacctttgcgcgggatgcacccttgttgacgatctccatagcgtccacggtgcgcagctgtaccgccggtgcattgccgaacgcacgcagcgcactgcgcagcttgcgttgatgcagatcggtattctcgaggtcatcgtgaatatcgccgtccatggtgacgacagctgcggcgcccgcttccatcaggctgcgatacagcggcacgcgcagaaagccgttgacgagcacaatcttgcccttgacgttcaacaggtcaaccgggagcgcattttccacgtagacaaaatccgccgtaaaaccgtctgcggcggtgctttccgcgcactggtaaccgcgcacggtatagctcttgcggtacggctccagaatctcgaatgtcgcttccacttcggcggattcgatctcaaacggctcaatcacggcggacagaccaaagctttcgcactccgctttcagaattttcgcggcttttaattcttctgaggagccggccacgcgcgtaaagccgattttatcgagcagtgcgaacgcacggttttcatcatattttttcaatgtaaacaactgcctttccctttgattttatacggtatttattcctattatatagtatacaaaataaattgcaagcaattttgcgccaaaatgaaagtgtacggctttaaaaatgcaaaaagcaagatcattccctgcttttagagaataatcctgcaattctgcatataaatttacttaaaacgcctgtgtgcagacgaatttaatctcttcgatctccatgccggtctggccgaagtagagcttgagataattcgtgccgccgaacagcacaccgatgtcctgctccgcggtaacgacctcgccgttcgtgccgttgatcataaccatgccgcgcaggttgccgtcgatgaagatagacatcggaatctgcgccacttcattggcgtttgcttttacgcgcatgacaaacttatagaggccgtttttcttatagcggatgccgagaatggtggaagcgcctttttccgtattgactgcggaaatgtcgagcggggcttcgccatcgatgaactgatactcgccgttgaaatcgacgtaatcttcgctcgtcttctccgcttctgcggcttcgcgctcctcatcgctcatgcggccaaggctgcgctccatcacaggcgagttcatcacggtgcggcagatattcatcgcagagcgcacgagcgcgtcacgcgtcagtctgccgtctgcaatggcgtcgtccaaattatcgtgttggctgttcgaggcggcgtccgcgttaaccatgttgaggtcattctgcgcgcgcacctgtgcagcgacgttctcgcgggtggcttcttcgccctcgcgatcgttgccctttgcccaccagtcggtcataacggtacctatgaagccccactcgtcgcgcaagatggtcgtgagcaggtcgaagttgctggccgtccaaatgccgttcagaccaccgtaggtggacatgacagagtatgcgccgccctcttttacggccgtttcaaacgcgcgcaggtaaatttcacgcagtgcgcgctcggaaaggacggaatcgatctcggttctcttaaactcctggttgttgcaggcaaagtgcttgatggtgccggtgacaccgaagcggcgcataccgcgcagctgtgcggcggcgagcttgccggtgagcagcgggtcctccgagaaatactcgaagtttctgccgtttaaggggctgcggtggatattgagacccgggccgagaagtgtatcgatgcggtttttgcgttgctctttgccttgcatggcgaaaagctcttcattcagcttctcattaaaggtgcaggcgagcaaggtgccgttcggcaggctgaacgcgatggtgccgcagtccatacgaatgccggaggggccgtctgcacagcaagctgtgggaataccgaagttgacgaggttttccgtgacgccgccgaacgcgcctgcggtgcccgctgtgaccttcggagagttcatgccctcgccgcgcataaggcagatgaggtcttcgtcggaaagctgcgctacaaagtcttccagctccgctttgccgtcgaatacatcgccgagcttgatgcccttgtcgcccgtatacggctttgcaggctttaatgccgccgcgctgcgggccgccatatcgtattcgcgctgcggtgcgggctcgaatgcgattgtgttattgtgattcaccatgcggtcaaacttcgtgaccggcgcgcacgcctgcacacacgtgcgggtaacggtatcttctttcacttcaaagctgccggagagctttgcgccgcgcacgcagccgcccgtgtagacattatacgcgccgctttcaagcacatagcagaatctgtgtcccgtaacgccgttgtcgtcgtaggacgcaagatttgcgattgggaacgtgagcgtaagcgtttcgctttcgcccggctgcagggtttcggtctttgcgaatgcggcgaggcttcttacggccttgccgagcttgccctgcggtgcttcaacgaagacggtgacgacctctttgccctgcacgtcgccggtgtttttcacggtgactttctctgtgacggtctcgccgtcgaaatcgaagctttcaaccgtgcgggtgaaggtcgtgtagctgagaccgtagccgaacggatacagcacacaatcttttgcgaacgtctcaaagtagcggtagccgacgtagatgtcttctttataaatgacccgtgtgggatcaccgaagccctctgtggacggataatcgctgatgtcaagcgcgatggtgtcgctcagcttgccgcacggcgtgacagtgcctgtgagaatatctgcagcgcctgcgccgccctcttggccgccctgccagacgtacagcacagcggcgggatcgtattctttcacccacttcatatcgatgatattgccgacgttcagcagaaccgcaacacgcttgaacgcgccgcaaacctcttttaacatctgatgctcggcggccgtcaagagatagcttccctctgcggcgctgttgtccttatcttcacccgcggtgcggccgatgatgacaacggcgatgtcggactttgcagcagcctgttcggcgagctctttcgtgacgggcatttcctcctggcaccacggctcctgtgcccagcccatgcccttttcaaacggatggtccttcagccagtcacggtaggtctgctccagctcctcgttgacagaaatgtctttgttttcttttaaagcgtccagaatgttcgtgacgtagcgggtgttgactgcgccgccggagcctgtgccgctcttataatagtcgaactgaattctgccgaacacggaaacgcgctcaccctttcggattggcagcgccttgtcgtcatttttcagcagcacgcagccttccgccacggcctgccgcgccagcgcggcatactcgttccaatcgatcttatacggattgctcattttatttttcctttctgcatgatctatgccgtttacggtgtattctctttgttataatgataaacgattttgtggattttatcaagccgtgcagctaagtttctgttaaaaaatcacgtgaacaaaaattttcattgtaaaacgctttaaaaacggttatgatacatataaatagaaaccctttacggaaggagttaccgttatgcctgctttttatgcccattatcgctttggctgcgatgttttaaaacagctgccggaggacatccgcagcatttgcaccgcgcaccgcgggctttttgacattggcttacacggaccggacatctactttttctatcgacccgttctgccgaacaaggtgaaccgcatcggctatgcggcacacaagcgctccgggcgctactttttacagcgcgcacagaaggtcattgcgtctgcgcatgacaaagatgctgcccgcgcgtatttctacgggcttttatgccactttacgctggattctatctgccacccgtacatccacacggcgatgaaagaattcaacgtcacgcacgcggcgacggagaccgctttcgaccgcgctttgttactcaaagacggcaaagacccacagcactttgacccgtgcggtcattttgaagtgaacacgcgcaacgccgccgtgatcacgcccttctacacgccggaagctactgtggcattgaccgaaaagagcatctcctccatggtattctacggccgtgtgctgttcacgccgaacaaggcgctgcgccgcgccattgacaccgggctttacatcacgttccaccacgacgccattgccgatatgatgatgaccacgcaggacgtgccaagctgcaagctgtgcacagagcaccttatcgaactgtacggtaaagcactggagcttgcgaaaacgcttttcccggctgcgcaaaagctgctccaaaacgaaaaagtctcctgtccggagcttgaccgcacatttgacggctgatttcaattttttaccaaaatacccgccatgcaggaaccaaaacgttctgcacggcgggcattttatttcccgggttttaccctatagcaaaagctcccgttcacgaaaacctgtgaacggaagctttgattttcacttacaaatccaatcagatttccggctctaccagatggcaggcgcagaaatgacccggacgaatttcacgcagctgcggcttcgactctctgcacttgtcgcaggcgaccgggcaacggccggcaaagttgcagcccttcggcgtgttgatcggactcggcacgtcgccggaaagaatctggcggtgcttctgcgcttctgcactcgggtccggaatcggcactgcggaaagcagagccttggagtacggatgcagcgtgtgcgcgtacagatcgtcggaagaagcgagctcaacgacattgccgaggtacataacggcgatacggtcgctgatgtacttgacgatgttgaggtcgtgcgcaatgaagaggaacgtcagtccgagctgctgctgcaggtcgtgcagcaggttgatgatctgggactggatggaaacgtccagtgctgagatcggctcatcgcacacgatgaattccggctcgatagcgagcgcacgggcaatgccgatacgctggcgctgaccgccggagaactcatgcgggaagcggttggcgtgctctttgttcaggccgaccagctcgaggagctcgtatacgcgctcctgacggcgctttgcgtcgtacatgccgtggatgaccataccttcttcaatgatggaggaaacggtcatacgcggatccagagaagcgtacggatcctggaaaatgatctgcgcttttttcgcatacttgaaacgcgttgcggcgtttttcagattcagctcttcgccggcatagtagagcttgccggatgttgcgggataaatgcccatggccacacggccgagcgtggacttgccgcagccggactcgccgacaaggccgagcgtttcgcccttataaatatcgagagaaatgtggtcgacggccttcagcataccgccggaaaccttaaagtgcttgcatacgtcgtccagaacgatcagtttttcattactgctcatccggctcacccctttctgctgcgctcgggcaatcgggatggagcagccagcatgctgcctcatgaccctcgcccaccttgaataccggcggctgctcctcatgacaaatcttcatgcagtgtgtgcagcgggcaccgaaaccgcagcccttcggcgggttcagcaaatccggcggtgtgccggggatggaaacaaggcgctgggtcttgttcatatccacggacggcaggctctttaacaatgcctgcgtgtacgggtgcgcattgcggtagaaaatatcctcgcaggtgccggtctctacaaccttacctgcatacatgaccgccacgcggtctgccatggacgccacgacgccaaggtcgtgcgtgatgaggataatcgcggtgctggtcttctctttgatctcggcgagcagatccataatctgcgcctgaatggtcacgtccagtgcggtggtcggctcatcggcaatgaggagcttcgggttgcaggaaagtgccattgcaatcatggcacgctgacgcatgccgccggagaattcgtgcggatactgctttgcacgctcttccgggttcggaatgttaacaagggagaggtacttaatggcttccgccttcgcctctgccttggaaagatgacggtggtgctgaatggcctcgacaatctgcttgccgacgggctttgtcgggttcaggcaggtcatcgggtcctggaagatcatggaaacttccttgccgcgaatcttctgcatttctttttcgttcgcggctacgatgtcgtgctcgccgagctgcacgctgccctctttaattcttgcgggcggcatggggttcagcttcatgatggtctgcgccgtgacgctcttgccgcagccggactcaccgacgatggcgagcacttcgccctcgctcagcgagaacgtgacgccgcggacagccttgacctcaccggcgtaggtatcgaaggaaacgtgcaggttctgcacatctaatactttattcatgttgaattacctcctcaagcgcgggtcaaatgcatcgcgcaggccgtcgcccaacaggttgaaggaaagcattgtaaggctgatggcaactgccggcacaacaagctggtacggatacgtcatgaacacatcttgaccgccctttgccagaacgccccaagacggctgcggaaccggaacaccgagaccgatgtaggaaaggaacgcctcggtgaaaatcgcgctcggaattgcgagggtgacgttgatgatgataacggaaagtgcattcggaatgaggtgctttgcaatgattctggagctctttgcgcccatggcttctgccgctacgatatattcctgactcttgagctggagcacctgaccacgcacaagacgtgccatgccggtccagccggtgatgccgtaggcgacgaccatggtgaagatgcccttcgggagcaccatcatcaaaagaataacgacgataaggtacggaataccgttgacgatctccacgatacgcatcatgatggtatcaaccgcgccgccgacgtaaccggaaataccgccgtagatcaggccgacgatgaggttgacgaacacggctgcgaacgcgatcatcagagagacgcggccgccttcaaaggcgcgcaggaaaaggtcacggccgaggttatcggtgccgaaatagtgtacatggtgctgtccctcatagcgggagtctgtacaaactgtcatgaagcccttgttgacttcgccaaggtgctgttcacggctctcaaacggagagaagaacggcacgatgatgcaggaaaggatgagaagcacgatgatgaagaaacacacaacggcaactttgtttttcatcagtctgccgatggcatctttccagaaggtcgtgctcgggcgggaaatgccctcgcggcgagcggagtcggaaccgatccactcaaaacggcttttatctatctgtgtcatactcagccctccaatttcacgcgcggatcaatgagaccatacgcaatatcgactacgaggttcgcaataataaggaacgcgccgtagaaaaccgtggtgccgcagatcatggtgtaatcgagaccctgaatgctctgcacgaaatacttgccgaggcccgggataccgaaaacgctttctacgacgaagccgccggtgaggatgcctgccgtgatcgggccgaggaccgtgacgaccggcatgatggcgttgcgcattgcatgcttaaagatgatgccgctctgggaaaggccttttgccttagcggtcttgatgtaatcctgaccgagaacgtccagcatgctggtacgcatcagacgggagatcgtcgcgagagaaccgaagccgagtgcgacaaccgggagaatgtggctgttgaagccttcccagccggtaatagcgaaaatacgcatgcccgttgccatatacagcttgaggccgaggaaatactgcaaaacagaggccacaacgaacgacggaacggaaacaccgagcagtgcaataatcatggcaactgtgtcggctgccttgccgcgcttaatggctgcgagtgtgccgaggagtacgccgccgatgaaggcgaagcaaatggaacggataccgacgtcaaacgaaatggcaaatgcttcggtgatcatcaatgtgaccgcacggttataggtaagggaaacgccaaggtcgccctgcacaacattaccgatataaatgaagaactgctgccatacgggcttatcaagaccgtatttcgcataaagcgcttccatctgtgccgcgggaagctgcttttcaccggtgaacgggtcgcccggaagaagctgcatcatgaagaatgtgatcgcgaccaacaggaacagggtaacaatggaatagcccacgcgctttaagatgtacttagtcatgtgcaatccacctctctttgatagtttaatagaatgattaaaggttatgcggacaaagccgccgacgtttttgggaacgatgccgccaaagcgtccgcggccttgtccgataaacgacaatatgacaatataacaaaaaatgtgcgcaaaagctcggaaattattctgccgcctttggcacatcaattttgtgaacttagcgaatgcagcttgtattgccgttcgcggaaatccccaaaatttcggggaaacaaggctttactcacccaacacagtgatgcgtatatcacctaaaagtgttgaagtaaaagattaaaagaataaatacagttcggtgcggcgcacccttttaagatgcaccgcaagccgtaaccgtatttgaatttcttttaagtatccgggtcagcgcccgtaaggttttcgattaggaaagctttacgtaaacagcgttgatatcctggaacgtagatctgtgcataccgcccttgatcttatcggagcaagcataggacggagctctccagaaggacgggccgatcgggagctgatccgcaatgatctgctcgcactcgatgaagtaagactcacgcttttcaaggtctgtctccttggctgcgaggtcgatgagctcatcgtatctctcgttggagaagccggtctggttgttgccgccatcggtgacccacatgtcaaggaaggtgttcgggtcgttgtagtccgggccccaaccggtgatggacatgacatagttgccggtcttacggttctgagaaccctgcttggtgatcatggagttaacggcaacctcgatgccgagaacctgtctccactgctcctgatagaaggaagcttctgcaatagacgtcggggagtcgccgcagtcgatggagaggtgagcggagagatcatctaccgtgcagccgagctcggagagagccgttgcaaggtattccttagctttttcctggtcacgggacggcgcatacagctcgccgaccttacctgcaaagggggtgccgtcagcagcggaaacaccgggcgccgtgaaggaagtcatcggctcgttatcgttctgccaaaccgtatcaatttccttctgcgcgtcaattgcattgaacagtgcacgacggagatttacattggagagatactggtcattgttgttgaagtaaatgtagaatgcggtaccatccgtataagactgaatcgtagcacctgctgctgtagcctgcttgatgagttcgccggtgccgagaccgaccatatccaggtcgcctgcgaggaaggaggagagagctgcgttggcatcggtgatgatcttccaatcgatctcttcaacttctacgtctgctgcgccgtgccatgcatcgtttttctgcataacgatcttatcgttgtggctccactcagtaagagcgaacgggccgttcgtgcagaagtactgcgcttcggtggagtagaggtctgcgcctacagcctcatagaatctctggttgatcggagcaagggtgccgaaggagaacaggaacagtgcgtacggagtcggctgctccatggtaacctcaagggtataatcatcgacaacctttacaccaacttcgtcccaagtaacttcaccgttgaagtacttttcagcgttcttgatgaagtagaggaagtaagcgtaatcagaagcaacatccgggttcaaagcctgactccaagcaaactcgaagtccttcgccgtaaccgggtcgccgtttgtccaaacgccgtccttacggaggtggaaggtgtaggtgagggtatcctcatcgtagtcccagctctcagctgcgcccggaactgtgttgtcgtcatcgtcgagggtgacgaggttctcatacatgtgcttgaacaaggagaactcgatggcatatgtggaggtcagggtgttcaggcctgtcggctccatacctgcgttcaggctgatagtctttgcagcgtctacggtcttcggggtgaagattgccgtagcgtcaccggatgcagccggggtggaatctccggaggcggtggactcggtggattctgcgctgctttcagaagctgtgatgctctcggtagatgtcttggagctgttgccgccgcacccagcgaatgcggaaacaaccaacgccgcggacagaaccagagctaaaaccttcttcagtttcatttcttgttcctcctaatgtgataggtgatagaattatgaaattttcgttcaaagaaaattcatattgcatacataatacagcataaagcgctaaatcgcaagtggcaaaactatggaaatcctgtcctaattttcatgtatttttgtgaattatgaccttgaggcatatacacaccgtgcagtttttcatgatagtattgcaattttgtaattaaatccgcccaaaatccgccaaaaaaagccgcgtcaggggcatgtcctcgacaaaaatacaagtttccgcgtattgtgcacgaacgacggatagaaaccgaattcctgcattttacggtgaaatccgacaagttttctcctgtttttgaaagagaacgcgcaaaaatgcagtttacccggaaaatatgttggacattttcgaagttttgtccacctgcctctcccctatgtgcgctgttttctatgcgttttttgctgcaaagccatcctatatataatagtatgtgatattctaatatcgatattgaatacggtttttgctttagtttgcatcagatgtccttcactatgcatgcttaccggtttttgtgcaactgcgggaaataaaacagaaccccttcgccgtgcagacgaagaggttccgtaatgcaaatttaaaatcagccgtggatggagtagttcggggcttccttcgtaatctgaatgtcgtgcggatggctttccttcaaacccgcacccgtaatgcgcacgaactgtgccttctcgtgcatttccgggatatttgcgcagcccacataacccatgccggagcgcagaccgccgaccatctgataaatggtatctgcgagcggtcccttataaggcacacggccctcgacgccttccggaacgtacttcttgttgtttgcctggaagtagcggtcgctggagcccttacccatagcgcccagagagcccatgccgcggtagaccttgaactgtctgccctgatagagctcgtactcgccgggggtctccttgcagcctgcaacaagggagccgagcataacgacgcttgcgcctgctgcaagcgccttgacgatatcaccgctgtacttgatgccgccgtctgcgataaccggaacgccgtattctgccgccgcgcatgctgcgtcatacacagccgtgacctgcggcacaccgataccggcgaccacacgggtggtgcagatggagcccgggccgatgccgatctttacgcagtctgcgccggcttcgataagcgcacgggtgccctctgccgttgcaacgttacccgcaatgagctggaggtctgggtatgctttcttgacctttttcactgcttcgatgatgccgctgttgtgaccgtgtgcagaatcgagcacgacaacgtcgacctgtgcttccacaagggcagcaacgcggtccagaacgtcagccgtagcgccgatagccgcgccgcagagcagacggccgccttcgtctcttgcagagttcgggtactgcacagctttttcaatatctttaatcgtgatgaggcccttcagatagcccttttcatctacaatcggaagcttttcgattctgtggtggcgcaggatctcctgtgcatccttgagggtggtaccgaccggcgcggtgacgaggtgatccttcgtcatgacgttttcgattttctggtcgaaatcggagccggacatgaagcgcagatcgcggttcgtgatgatgccgacgagcttgccgttttcgcagattggcacgccggagatcttgtagcggcccatgaggttatccgcctcgcgcacggtgttctccggcgcaaggaagaacggatcaacgataacgccgttctcggagcgcttgaccatatcgacctgatcggcctgacgctcaatggacatgttcttgtgaatgatgccgatgccgccctcacgcgcaatggcaatggccatgtccgcttccgtgacggtatccatagccgccgtcataatgggagtgttcagcttgatcttctttgtgagatgagtggaaatgtctacctgactgggcagtacgtgtgattctgccgggatcagaagaacgtcgtcaaaggtgagcccctctttgacaaacttagaggtgaattctgtgttcagcataccgtcaaccatcctttcgccttgtgcaccgtgttttgttgtctttatgcggtaatttccgcataccgcataggaaaaatttcccggcaagccggagaaaatatattatttggtattagattgtaccactttcgcggtacattttcaactgttttgtcctcgaaaaaacagagatacccgctgagcgttctatgcgctttttagggaaaaaccacaaaaagcggttttatgtggctaacttccgggtttcggggcgatttttgcaggattttgacggactgaacttctaaaaagcactccatttgtaaaaaacttcatacagaaatcacaaaatatcttgacactccgctccgtttgatataccctaaaactactatatcaaaagcatatctcccgtacccgacatattcggcgcacggcatatttttcgcgctttccctattacactcggccctattgggctaaaaggatggtttttcatgaacaagcttcgcagattgcgctccctctccccggagatggcggaaacgctgcgccttgccggcgtgcagggcattttttgggcggccatggcggtaggcaattatcaaacagtctacctgcaaagcatcggctttcccgctacggatttcggcttattaaacgccattgcctgtgccgtcgctatttttgccatgacgttttggggcacggtgagcgaccgtatcggcagcgtgcgcaaaattgtcattttaacgctgacgctcggctgcggccttttcatttttgtgccgctcattccgacggggcaatcctactcaacgctattatttctaatcttgatcccgatcatcaactttttccgcgtaccgatgtcgccgtttgtcgataaccttacggtgcgcaactgtgcggagcatcgactgaattacggcatggtacgcagcagcggctcgcttttatttgccattgccggtgttatcacggtaaacgcgctcattcctgcggcgggtgtgccttcgacgttctgggtgatgggcattgtgatgattcctgccattgttctgacgtatttctgctttgagccgcagagcggcaagcgtgtaaaaaagagcgcaacgggtgccggcgtactgctgaaaaactacgcatacatggcgtttctcatttttgcattcttcttccagatggccgtggcgtttgaagggagcttcttgacgtattacatggcggatattcagatcgataccgtcaatcttgggctcattctctccgtgcgtgctatgatggaaatcccgtttctgttcttcatcggccgcctgcgccgccatatcaagatgaaatacctcatcatgctttctgcaattttgatggcgacggagtgtctgtgcttctgcttccttgtgaattcgctgccgactatgttggtatttgccgcgttttacggccttggcaacggtgcatttctcggcacgggcacgaactatatctatgagcttgcacccgtggagctgcgtgccacggcgcacagcctgttcatttccgtggcgcaaatctccggcattctcggcaacctgctcggcggcgttctgtttgacaccatcggcggcaaagcgttctatggcgtaacagcctgcatgtttctcgtttccgttgcgatcttcgccgcaagctttctcttccaccgcaataaaaaagaaacggctgcggcatgaccttcaaatactctgtgctcttaaaggctcgcttcggcgggccttttgttttgtctgaaaacacacgccttttttgtatatgtcgaaataacgtttccaatccattttacgctgctttttagcgtacccgcacgcaacatgtcgtaaaaatgaatgcgtaaagtatattgcctttccatatatagccgataccttgtgaaaaacttagtttcccccactataccgtgtgcttttccacactttccaccgagttttccacaccgtaattttgcagaattatgcatatttatacacaacttcgttctgcgattgtatggttgtttgttctcgcatcgtggacacatctgtgtatatctgtcgaaatgtgtccgtaatcggagatacatacgttcgaaactgttgaatattctttcactcctttaagttgaaaatctgttttccacatatcctcagaaaaagttttacacaagacgatggcgaaaactgttgccttttgaaagttcgtgttctttcgttccgctttgcatcatttctcctattttttaatacggtcatcagagcaagtctttctataagcagacggcaaaagaggcacatgcattttactttgcatgtgcctcttttgtcacctatttaatttgcaaaaatcactttttcgggacgataacttccttgccgcccatgtacggacgcagagcttccgggatgcgaacgctgccgtctgcctggaggttattctcaaggaatgcgatgagcatacgcggcggtgcaacaacggtgttgttcagcgtgtgggcaaggtacttgccgttttcgccgtttacgcggatgcgcaggcggcgcgcctgtgcgtcaccgaggttggagcagctgccgacctcaaagtacttcttctggcgcggggaccacgcttcaacgtccacagacttaaccttcaggtctgcgaggtcgcccgagcagcactcgagcgtgcggaccgggatatccatgctgcggaacaggtctacggtgttcttccagagcttatcataccacttcatggagtcttccggcttgcagacgacaatcatttcctgcttttcaaactggtgaatacggtaaacgccgcgctcctcgatgccgtgtgcacctttttccttacggaagcacggagaatagctggtcagcgtgagcggcagttcggcttccggcaggatctggtcgatgaatttaccgatcatggagtgctcgctggtaccgacgagatacaggtcttcaccctcgatcttgtacatcatggaatccatttccgcaaagctcataacgccggtaacgacgtcgctgcgaatcatatacggcgggataacatacgtgaaaccgcggtcaatcataaaatcgcgcgcatacgcaataacggcagagtgcagacgcgcgatgtcgcccatcagataatagaagccgttacccgcaacgcggcgtgcagcgtccagatcgataccgttgaagctttccatgatctccgtgtggtacggaaccgggaaatccggaacgaccggctcgccgaaacgctcaacctcaacgttttcgctgtcgtctttgccgaccggcacgctggcatcgatgatattcgggatcgtcatcatgatcttgaggatcttctcgtcgagctccttttccttcgcttctgcggcgatgagctcatcggactgtgccttgacctgtgccttgacctcctcagcctcggccttcttaccctgacccatcagtgcaccgatctgcttggagagcttatttctggaagcgcgcaggctgtcggccttctgctgcgtagcgcgtttttcggtgtccagctcgatgacttcatcgacaagcggaagctttgcgtcttggaactttttcttgatattctcgcgaacaatgtccgggttttctctcaaaaacttaatatcgatcatttttgaacattcctttcggttatttgtggctttttaagcatttttcttggttcttgggccggtttcgcatcgcgaaactccaataggcaaaaaagtattcgagctctgcggagcttgaccaaggggtttacccttggaacccacagccttttgaaaaaggctggcgaaaactttattcgccccgttcactttagctttgtgatttactcgcccgttttatcggtcaatttcaaatcatacagcagattcttgaggtcttcctcaccataaaactcgattgtcagcgccgcttttttctttgtgccggagatatgcaccacacggtttaaaacgtcacgaagtgcaagctcggcctcgtcatagtagcggatgcggcgctttgcgggtttatctgccttttccggcttctcctcgttggcgcgctttgccattttttccagctcgcgcacggagatgccctccatggtcacgcgtcttgccgccgctttcatctggtcttcgtttttgaagctcagcagcgttctggcatggcccgcagtcatttcgccgcgctccagcatgttctgcatatcctccggcagattcaaaagccgcagtgcattcgtgatcgccggacgggatttgcccactgtttttgcaatctcctcctgcgtgaactcgaagttatccatcagcatcttgtagccgtttgcttcttccagcggcttcaaatcctcacgctgcaagttctcaatcagcgccagctgcatcacttcgctgtccgtcaggtcgcggataaccgccggtacggtcgtcagtcctgccatgcgagaagcacgccagcgtcgttcacccgcaacgatctgatagccgccggaaagcagtgggcgcaccaagatcggttgcaaaacgccgtgctgcgcaatagaatccgccagctcggtcatcgcgccgtcatcaaagctctggcgcggctgcgtacggttcggctccaagtcgtttatgctgagctccaccgcgccggcatcgtcctcacgcgcattgtcatagaaaattgcgtccagccccttgccgaggcctcctttttttgccattgcgaaagaccatctccttcttgtcgcatttataccgataccacacgattttgcgcatgaaaccggttttgccgccgaaatcagcggtttttcttcaaaatttcatccacaagcgcaccgtatgcgatgcagcctttgttggatttatcgtagtacaagatcggctgtccgtagctcggcgcctcggaaagacgcactgtgcgcggaatgactgttgcaaacaccttgcgcgggaaatactttttaatttccgtcacaacctgctgcgtcaggttcagtctgccgtcatacatcgtcagcaaaacaccttccagctctaaacggtcgttgtaacggcgcttcacagcctgcacggagctcatcagctgcgaaaggccctccaacgcgtagtattcgcactgtaccgggatcaaaacagagtccgaagcattcagcgcgttcgttgtgataagccccagcgacggcgggcaatcgatgatgatatagtcgaattctgtgcgcagtggcgccaaagccttctttaaaacggactcgcgcccgttcaaatccgcaagctcaatctctgccgcagccagatcggccttggaagggatgacagaaagcttttcaaattttgtttcgagaacggcatcttcgccctttgccccgttgatgagaatatcatatgaggtcgttttcagcgttcggcgatcaaaacctacgccgctcgtggagttgccctgcgggtcaatatcgaccaaaagcgtctttttcccttttgcgccgagccatgcggcaatatttactgcgctggtcgtcttgcccacgccgcctttttggttcgccacggcaattaccttgctcatgtaccgcgcccctttccttcttctttctattatataggatattgtagcacatatccggcacagaataaagagaaaagttcatttttttgcaatgtttcatgtgaaacagccggattttatcgcgttttggcaaattttgatgtttcatgtgaaacatttgcagttttaaaccaaaaaagcattaaaaacacagaaggactgccggcatttgcagacaatccttctgtgttgtgggaaatgaataagggaatgggtttacctcgtactcaatattaagttctggcgcatcagcttgccttgtgtgcagctgattttgggatgcggacgacgcattcgtaatactcatccgtttccttacgctgaaaagctgcgccgatgccggcctctttcatggtttggacagcatggtcgatcgtgttgaggaacaggcgaacatctttcgcaatgaatgtcctcttcggccttttcgcctgtccctcctgctccaaaagtgatttgatatacgtatccgtctgtgccacgttcattttgcgcgctatgacagtctttaacgctgccatgcgcttttccggatcctccattctaagcaaagcacgtgcatgacgctccgtaaggtggttttccagcaccatgcgctgctcttcgccggaaagccgcagcaaacgaatcttgtttgcaagcgacggctggctcatgccgagcctacgtgcggtctcctcctgcgtcatagagcggtcctgcatcaaagcatagattgcagcagcttcctcaaaaaaattcaggtcactgcgctgcatattttcaataagcgccaacaccgcgccgtcctgcggagaaagctcctgcacaatggccgggatggttttgagccccgccatacgcgaagcacgccagcggcgctcccctgccaccaaaatgtagcggtcgcggtctctgcgcacaagaatcggctgcaaaacgccgttttgacgaatgctttctgcgagctgcgaaagctcgtcctgcggaaaatccaatcgcggctgtgcaggatttggcacaatcttatccggtgaaagctccaaaagctttttcttttccgtaaacgccatacgccgcacctcctgcttgaatttccagtgtaagaagttgtcctttgtgagggcttgttttctttacaggaaatagcttaccacaatgaaaaggcagattttgccgcaatctgtcaccgtacaaaaagtttttcttgcttttttgaaacgcggtgctataataatagaaatattcaaacggaaaagcgtcgaaaaagcgcatattcccgccatttttagagaaaaggagcgaaagaacatgatctatgcagaaaccgaaatccagctgaaaaacgggtgcaccgccgtcgtacgcaatgcacgccccgaaaatgccaagcagatgattgaatacctgcgcaccgtttcgggcgaatctccgtttttattgcgtgagccggatgaggtgaatttcaccgtcgaaaaagaacgcgcaattttgcaaaacaaagcggaaagtccaaacgagatcatgctcaccgcttatgtgaacggcgagcttgccggcaactgttcgctggcgtcgcaaggtgataagcgccgcacaaagcatcgctgctgtgtttccattgcgttatatgaaaagtattgcaaccttggacttggacgtatattattaagcacactcttggagcttgcaaagcaatgcggatacacacaagcggaactgggtgtgattgaaggcaacgagcgcgcaaagcatgtttacgaaagtctcggatttaaagaatatggctttttgccaaatgctatgcactacaaagacggtgccacgcgcggcgaatacttcatggtgaaagagttataagttccacgtgaaacaaaaaaagggcagctatgcgaattacctctgcatagctgcccttaaattttgagtgcttttacaaatatttcttaaagcccttcacttcactgtagccaatggcatcatagaatttatgcgcgccggtacgctgcaggccggagaccaaaatgcagtagtggcactctttctctctgccccacgtctcaatggcttcaaacatgccgcgtccgataccttttccgcggtacttttcgtccgtaacaacattttcaacgagtaaaatcggcttgcaggtatcgcaaatatcttcaaatacaacaccaatcaaagagccacaaaggtcgccgttttccgtattttcagctacaagcaaatagttatcctcgttctttgcaattttctctatcttttccgccattttctgcggatctgccatcgcatcggaaagctgcgccaaaagtgggttcagcttcggaatgtcgttcaattcggctttgcggtagataatgttcattttgcttcccctttctgttctaaaaatagtggctttttggtaatcgtaccgccgtgacgcggatacattttcggcgtaaagcgcaatttgcgcattacggcaacaaagcgctcgctctgttcctcatccggcagaatgaaaggaaccgtttttacaacatcgcatccaagcgaagagattgcttttcgggcatattccagttcatccggcagactcggacctttcatcgcggcaaaatagcccttcattttaatgagcggaatgcaatattccgccaaaatattcatatttgcgaccgcacgagccgttgcaacatcaaagctttcacgtagcttagtgtcttttccggcttcttccgcacgcttgtgaatcgtctcggcttcaatgccgatggcatcacacacttcgcgcagaaaaacaagccgcttattcaaagaatcgagcagcgtcagttcaatgtccgggcgcatgatcttgagcggaatgccgggaaagcccgcaccggtgcctacgtcgataactttcgcattctttttaatttcaagcgctttcagcaacgtcaagctatccacaaaatgttttatgactgcctcttccgggtcggtgatggccgtgaggttcatcacggtgttgcgctccaaaagcagatcaagatagatctggaactgctccgcctgtgcaggcgaaacctttacgccaatctcttttgcttttgaaatcagcagatttttaatatccataatcaaaatttcagctcgcctaaagcaaagctgccctttcagttttgttttataaatattatagtaattaagttcaattcattgcatgttaaatgtagcggacatcactttccttcattgtgcgcagagagccaaatcaacagcacggaaatatccgccggggaaacgccggaaatacgccctgcctgtcccacgttttccggacgcacgcgattgagtttttcctgtgcctcaagtcgcagacccgaaatctcggcgtagttgatctctttcggcagcagcttcttttccaaccggcgcatttcggcaatgtcctgcagctggcgcttgatgtagccctcatatttaagcgccgtctccacgctttcaaaaatctcacgcgggtaatccgggcgttcggtgtcgatgggtgtcaggtccgcataagtcacctgcgggcggcgcagcagctcagaaaggcgcacacccgtcgtgaccggcgatgtttcacatgaaaccagcacttcgttcagcgcgtccgtcggcgaaaacaccgttttctccgcacgcttcatctccgcttctttctgcgcctgcttcttttcaaacttcgcccaacggcggtcatcgatgagccccagctcgcggccgattggcgtcagtcgctcatcggcgttatcctgccgcagcacaagacggtattcagagcgcgaggtcatcatgcggtacgggtcggtgacgcctttcgtgatgaggtcgtcgatgagcgtgccgatgtacgagcccgcgcgatccaaaataagcgggtcacgatttaagactttcagcgcagcatttgcacctgccacaaaaccctgcgcggcggcttcttcatagccggaactgccgttgaactgccccgcgccgtaaagtcccggataatcgcgaaactccagcgtggcgttcagctgcagcgggtcgcagcaatcatattcgatcgcatacgcgtttcgcatgatttctacgtgctcaagccccttgatcgtgcggtaaaacgcaatctgcacttcttccggcagtgaagagctcataccctgcaagtacatctcctcggtttccgcgccgcacggttcaataaaaagctgatggcgcggcttttcggaaaagcgcatgatcttatcttcaatgctcgggcagtagcgcgggccaacgccttcgatcatgcccgtatacagcggcgaacggtggatattatcgagaataacctgcttcgtgcggtcgtttgtccagctcacgtagcacacagccgagtttttcggcggcatttccgcatcaaatgagaacggcgtgacaggttcatcgcccttttgaacctcgaggtcggtaaaatcgatggatgagcgcagcacacgcgccggggtgccggttttaaagcggcgcaacgaaatgccaagctcttttaaagaacccgcaagttccgtcgccgggaacatgccatccgggccgcccgcatacgaaacctcacccacaaagatgcgcccgccgagaaatgtgccggtcgccagtacaaccgcgcggcacgtgtaaaccgcgccgaggcgtgtcgtcagcagccagttttcgccgtctcgctcaatgtcgatgacctccgcctggcgcatcacgaggttttcgcactgctcaagcttatgcttcatcacgcgcgcgtacttgttgcggtcgatctgcgcgcgcagcgagtgcaccgcagggcctttaccaaggttcagcatgcggctttgcagcgtgcattcgtccgccgttttgcccatttcgccgccgagcgcgtccacttcgcgcacaaggtggccctttgctgtgccgccgatgctcgggttgcacgggcagttgcccacagcgtccatgtttattgtgaagatcaccgtgcggcagccgagacgcgccgaggccaaagccgcctcaattcccgcgtgtcccgcgccgatcacggcaacatcgtattttcctgcatcatagctcataatttaacttcttttccgatttattctgaaatacagcttattccaaagataaaatataacaattttgatattttattttcccacgcagaacttttcaaatacctgatcgaccaccgcatccgaaacacgctctccggtcagttcatttaaagctgcaatggcaccctccagcgagaccgtcaccgcgtcccacgtcatgcccataagcaaagcgttttccgcttcctccaacgccgtgagcgcctcttgtacgtccgcgcgttggcgctccgtatagagaatgccgtcgttcgggttcagctcagcggttttcagtgcgtgcgctgcagcgttttgcagcgcaggcagtccctcgccggaaattgccgagaccgtcacgacctctttgaaatgcttatcgatctccgcacggtcgatcttcggcgcgaggtcggatttattgatgaccgccacggccggtgtatcgcctatggcgtccatcaacgcgcggtcgtcgtcgttcagctcttcactcgcatcaaacaccgccagcacaaactgtgccgttttgacgcgatctaaagccatgcgcacgccgatctgctccacgcggtcttccgtatcgcggataccggcggtatcggcaagacgcagcggaatttcaccgagcagcacagtctcctccaccacgtcacgcgtcgtgcccgcaagatcggtcacaatggagcgctcgcagcccgcaagcaggttcatcagcgtggatttgccggcgttcgggcggcctgcaatgaccgtcaccacgccttcacgcagaatgcgcccgccgtcaaagccggcgagcaagtctttcagcgccgtttttccggcggcaaggcgcgttttcagcatcgtctcatccacctgtggaatgtcgtcgtccgggtaatccgcccatgcggcaaggtgcgcaccgatgtccgtcagatccgaacgcagcttttcaatgcggcgggaaagtgcgccgtcgtgtcccgcctgcgccgctttcatcgcttcgcgcccctgcgcggagatgatctgcatgacggcttccgcctgcgcaaggtccattttgccgtttaaaaacgcgcggcgcgtaaattcgcccggcgcggcagagaccgcaccggcagcaaaaaccgcctgcaaaaccgcttttaaaacgaacaatccgccgtggcaggaaagctccaccacgtcttcacccgtaaagctgtgcggtgcggcaaaaacggtcgcaacgcactcatcgaggcgctcgccgtccggcgcatacacgtgtccgaagcggcacgtgtaacccgccatatcacagagcttcgcgccggaaaccgacttaaaaacacggtcgccgaccgcgcgggcctcatcgcccgaaatgcgaatgactccgatgccgcccggcgccgccgccgtagagattgctgcaatggtcttcatagtttatcccttcttctcgttcgctgcacatgcaacactttctcattttgtattataccacgcggcgaaaagattgtcacgcagaatgtcggaaaacgcaggaaaatcacagagaaagcgcaaaaacctccgcataccaaagtatacggaggttctctgttttaaagttttagtttttggagatcttaccgtaaggcgtggaaacatcgtccagaacacgcggtgctgcgggagcggtgcgattttgtgccggacggttgtcacgactatctctgcgcggagcgcgaccaccgcgattatcgcggttgtagccgccgtttctgccacggttattgccgccgcgacggttatcacgctttacgtagcgctcgccgccctcagggccgatcacaacgtggcgggcaaggtcttcaccctcgctccaggacttcgcaccctcaacctcctgcacggcggtgtggatgatgcgacgctcatacggattcatcggctccaaggaggcattgcgaccggtcttcacggcccgggcagccatctttctgccgagattttcaagcgtttccttacgcttttcgcggtaattgcccacgtccagcgtaatgcgataataagactcgtccacatggtttgcaacgagagacgcaagatactggagggaatccagcgtttcgccgcggtggccgatgatgaagccgatgttttcgccggtgagcacaagctctgcgcctgcctcttcctcgcggatctcaatatttacgtcgccgagacccatgccggaaagaacgttgcgcagatactctgctgcagcgtctgccggtgtggaacggatgaacgcgcgcacctttgccggtctgccgccgaaaaggccgaagcgctttttctcttccgtttcaagaacttcaaattctgcgtctgcggggtctacacccagcattgcgcatgctttttcatacgcttcttctgtggttgcgcctgttgcgattgcttcttttaccatggctttcttcttcctttcttcttttcaatactctatctttatcccgtttcggagtgaaaggaggtggggataacagcctttatttatttcttgcttccgagataatcggtagaattgcctttgtttttctgcgcatttccgccttttttaccggccgctttcttttccttctgcgcagcctggcgctctgcctgcgcctggttcttcgcctcaatcttatcggcgatctgcttttgcaggtttgcgggcagcggctttaccttccgatccgcctgtaaaagcgtcacatagcggctcgcttccgactttgcggagacctgctccggcgaaaaatacttgtgcgtgatgagcgtctgtgcaaaaccgaccagcgcggaaataatccaatagaaaccgacagctgccggcatgatgtatgcccagtatgcggacaggagcggcatgccgtacatcatgaccttcatgcagccctgacctgcaccctgctgctgtgtgggctgcagcttctgcatgacaaaggactggccccagtaggtcacaagtgccagcaccgggatgatccacagcatagaagcgaacgagctcgtgttcggggacgcgagcaggtcaaggccgaagcacttgaagcccttgccgaaaaactcaatcttctgcacatcgtccgcggagaacatcgtcaggtggtccttcagtgcgtcgaaattcttaacgatctcaagctctacatactggttcgtgctcgcaatgcccggaatcttagaaacaaattccgtagcctgcgaaatggtgtcctttgcaatatgcagggtgttcgagagcggataaataacggagtaataaatgccgagcatgatcgggaacggaagcagcgtcgtcagacagccgccgccgggattcacaccctctttttcgtagagcttctgcagctcttcgttatacttcatctggtccttggcgtacttcttctgcagctcctgctgcttgcttgccaatctggactgcgccgccatgctcttctgcgatttaatcgagaacgggaacatcagcgcctttacgatgatcgtaaacaggatgatcgcgataccgtagtttttgaaaacggtgtacaggaaccacagcagataaccgagtacgctgccgaagaaattaaaaatagacatcatagtagttgaccaaatccttcccggatcaaaacttattcttttttccgcttttccggcacagggtcatagccaccgcgggaaaacggattacaccgcagaatgcgccaaagcgcaagcacgccgccgagtaaggcgccataccgctccacggcttcttccccgtactgtgagcaggtggggatatacttgcagcagccgcgcgttgcacgcggtctcagcttccgatagagatggatgagcccaatgacggcgcggcgcggccaataccgcacaccctttttcgccgaaatgcgtccgcctttatattgtatcgcagcggacacaggctctttctgttttctcatactgcttttctgatctgtcgttatgacaattcttctttcgttacacttgcggtttcttcgcccgtctccgacgtcctttcggagtcatttttcgccgtttttgcggagttgtttttatctttgggtagggcaacaagcacgccgagttcctcaagcgcgctttttaactgcgaagatacgatttgatagtttgcgaacggcgttctgccgcggctgacgaggacaaggtcataccccggcttcagctgcggatacagcgcacggatgctttcacgcagaaggcgccgcgcacggttccgcttgaccgcgttgccgatctttttgctggccgtaatgcccacgcgcgcctgctttacctttttattgcgcaggcaatacagcacaagcgccgggcgcaccgcgctttttccgcgggcgtaaacgcgcttatactcgtggttttcggtcagcggcacaaggatgtccatgggtaagcctccaaagccgttcggtaaggccaaagctgagtatagcagagccttgccgccgaaaaaatcaggcaaaacaaagaaaggtcacgcagcggtgaccctcaaagcatacattaataggttaaacgtgctctgccctttgctctgcgacgcgccagaactttacgtccgttgcgtgtagacattctctttctgaagccgtgctccttctttctgtggagcttcttcggctgataggttctcagcatatcaaaaaccctcctttcacgaggttacttatcaaaatgcggtctgcaaataacagtccgttacagataagcattataccttaaaaccgtagaagctgtcaaccttttttcgggtttttacggaaaaaaacttggaatgaagcgctgcaaaggcaaaagcagacgaaaatagaaggcctgcatgtttttttcagcctgaaaaaacacaaagcaaagtgcgcaatgccaaatgttttaatcgatcttttttcaagaaaggttatgggagcccggggaaaagtttcccattcctgcgttaaaaatccgccttcgcgctccctttttccaccctttctgcgtataaattgccgaaaacacgtttctttcccgctttttgcctgtgaagtccgtcagatttttcaacattccacaggttttctgtggacaactttgcggttttgtgctacactatatattagtattttagcgtcaaaatgcactttcaatgccgcttcttcggtcatcatgaccgccgcggcgcggctatgggcgcataccgataccaaaacctaaaagaaagggaataaggaaatggaatcattcttagaagcatgggacctcatttgcgactactgcaaaaagcaggtcaccgacgtgagctatgaaacctggttcagcaagctcgtccccatctcgctcgatttcggagcaggcgttgcaatcattcaagcgccgaacgaatttaacaaatccaccatcgagcgcggctttcacaagtgcttgaacgacgccgtacagagcgttttcggcgaagctttcacctataagctcatcaccccgatggagaaaaaagaaaaagagcgcgtgccggacgatgacgaatacgagtacacgtttgaaacgttcattgagggcagctccaataaatttgcctgcgcagcctgccgctatgttgcaaaagagccggccaaaaactacaatcccctctttatctacggcaactccggcctcggcaaaacgcacctgctcaacgccatcggtcacgagctcaaaaagaatttcccggataaggatatcatttacgtcaagggcgaccagtttgcaaacgagctgatcgaggccatccgcgccggtaccaccgtgagtttccgcgaaaagtaccgcaaggccgacgcactcctcatcgacgatattcagttcatcgccggcaaggaatccacgcaggaagagttcttccacacattcaatacattatacgaatccaaaaagcagatcgttttaacaagcgaccgtcccccgcgcgacatcgctaccttggaagatcgtctgaagacccgctttgaatggggccttaccgccgatgtgcagccgccggactttgagacccgcatggcaatcatcaagcgcaaagccgagcttgtcggtctcagtgtgccggacaacgtctgtgaatttatcgcacagaagctcaagagcaacatccgccagctggaaggcacggtcaaaaagctcaacgccatccatcttgtggaaggcgccacccccactatcagcacggcacagcgcgccatcagcgacatcgtaaacaacgagcagcctgcgcctgtcaccgtcagcaaaatcattgaagaagtcggccgcacctacggcgtttccccggaagatatcaagtcctccaagcgcaacgcaaatgtttcctttgcgcgccagatctccatgtatgtcgtgcgcgagattacacagatgcctatggtcgagatcggcaaggaattcggcggcagagaccactccaccgtcgtttacgccatccagcaaatcgaagaaaaatctgcgcgcgatcccgtgacgaaggccaccgtcagcgacatcatcaaaaatattcgcgaccgctgatcttctttcacccctaaagtgctccatttcccttattctttcctatatactggaatacaggcaaattcgctgtacttttaaaaatatcaaatacagagcatttcctataacgttctgtataattgtcgtagactttcttgtggctatctttgaagcacaaccacaagatatagggtatgatctccagtgtccttacacacgaaagtcaaaataaaatcaacgagttttcaacatttcacacagagttttcaactgctctgtggacgaaatcaaattttccacactctccacaatccctccacatccattttcgcaaaactttcgcgcgattttcacctgtccaaagccactttttgaagtttccaactttttcacaccctctacgactactgctataacttatacttaaaataaatataaaaaaggaccgcaagcttactccttccacatctccacacccaaaaacacatagaaatgtaaaaaaccaaaatgcgcggtaaaacttccgcggtccaaaatgctaaacaaaaggccaaaaccacaaaaccgcgcagaaaggaagaacttatccacatgaaattcaccgtagaaaaaagattgttgaacgaagccgtaaccaatctgcaaagagcggtttcctccaaaacttctattccggcgctcgaaggcatcctcatccgcagcgaagaaaaccgcctcattttaaccgcttacgatcttgaaatcggcatgcaaaccgagctacccgccatcatttccgcgccgggcgcgatcatcctcaccgcaaagctgttcgccgagatcgtccgccgttcgccggacgaggacatcaccattgacgtggacgaccgcaacaccgccaccatcacctccggcgtgagctgcttcaccatcatcggtatggattcggcagaattcccggagctgccgaaaatcaccgacgccgatacaatcaaaatgccgcaggaactcttaaaaagtatgattcgccagacgctttttgccgtcgcggacagcaccgcaaagccgatccatcagggcagtttgttcaaaattgaaaacggaaatttagatgttgtgtcggttgacggctaccggttggccctgcgccgcgaggcgattaactacgcgaacaacaccgaatttgtcgttcctggaaagacactttccgaagtactcaagctcttaaaggacagcgagggcgaagtggagatttgtccgagccgccgccacattttgttccgcatcgataattatacggttatttctgctttgctcgagggcgaattcctcgattataaatcggcactgccgaaggataaaaaaaccgaagttacggtttccactcgtacgatgatcgaaagtgtcgagcgcgtttcgcttctcatcaccgaccgcctgaaaagcccggtgcgctgcgtgattggcgaagacaccgtcaagcttttctgcaccaccaccatgggccgtgccaccgaccagatttcagcggaaatttccggagaccagcttgaaatcggtttcaataacaaatatttactcgatgcactccgcgcggcggagaccgacgaagttcgactgcagctcggcggcccgatcagcccgatgctcgttctgccgaaggagggcgacgcgttttcgttcctcgtcctgccggtacgcctgcgcagcgaaatgtgatcgatgtttcacgcgctgtccgccattcacggacaagtgttacgactttcgtgaaacattaacttgtgaagctttgacaccaaaatctaaagtataaattccgtacaactttaatgtgcgaacaaacgcgaagattcgtacattaaatttatctttattttataaaggatcgaatatattatgaaaaatgagatcatcacgatcacaacggagttcatccgtctggatgcacttttaaagcttggcggcgcgttggataccggcggacaggccaaattcgtcattcaaaacggcgaagtcgaagtaaatggcgaagtctgcaccatgcgtggaaagaaaatgcgcgacggcgactatgccgaatataacggcggccgctatacggtaaaagtggaggaatgagccggtgaacgtactgcgcctcggctttgaaaatttccgaaatttgtgcccgggcgaaatttttccgggcgaaaccatcaatgtcattcacggcagcaatgcccagggcaaaacgaatttgcttgaggccatctggctttttacgggcggacattcgtttcgcggcacaaaggatagtgagttgccggttttaaaagacggcaaaaatgcgcctgcggcctcactttccatgacgctgtttacagaaggacgcgagcaggagctaaggctcgaactgcgcgacggtcggcgctccagtgtcatcaacggcgtggagaaaaagaccggctcggcgcttgtgggcaagttctgcgccgtcattttttcgccggagcatcttttgctcgtcaaagaaggcccttcgcgccgccgcgcgtttttagacggtgcgttgtgccagtcccgcccggcatttacgcgcgttttggcgcattataataaagctctcatgcagcgcaatgcgcttttaaaggatattccgcgtcacccggagcttatcgatacgcttgatgtttgggacgagcgccttattctgttcggcacggaggtcgtacaggagcgcgctgcgttctgcaaagatctggagccgcgtgcggcggaaatttaccggggtatcgcgaaaaacagggaggaaatcacgctttcctacgcgccgtttggcggtgcggagacaaaaacggagattgccgagcggttttccgaagcgctgaaaaacgccagaaatgccgatgctcgtgcggggtttacgtccgtcggcccgcacagagatgatttgacgctcaccatagacgggctttccgccagaacattcggttcgcaggggcagcagcgcagcatcgtgctggcattaaagcttgcggaagccgatattctgtaccgaaaaaccggcgagcgcccggttatcttgctcgacgacgtgatgagtgagcttgatatgagccgccgcgattatcttttgaatcaccttgacgggcggcaggtgttcatcacgtgctgcgacccggaaactgtgcgcctgatggaaacgggacgcgggttctatgtggaaaaaggcacggtgcggcaggatacggacgaaaaagcaggggaagtgcacgcggaaaacgaaacgccgacttgcgaaagcgagtaaacctgtggtatgataaggagcatggtatgtatattcaccttggtatgggcgttgtagtgcgcgaagaagacgttgtgggcattttcgatatggaaaacaccacggtctccggcgcaacgcgcgattttttgaagcgcgctcaaaaagagaaccttgtggaagacgtgtgctatgacctgccgcgttccattgtggtttgcagagactatatcggcggcgagcgcgtgtatatcacgcagattgccccggccacgcttttaaaacgctcccgcgcggagatcggcggcattgcgctgagaccgcacgccaagggactgtaacagaaaggatcttcatttatgcagtatttcggcattcctacctgtccgtattgcaaaaagcatgtcaaccttgttcgcacgtggagattgaagcgtgagggcgagtataaatgcccgcgctgcggcggtatttccaatatctatctttctccgctcgtgtatgtgtttgccgtgctggccatctgcgccggcgtgtgcatctatttcttccataaattcgttttagatgacatcaagctgttcacttgcctgcaaattttcatcccgtttgcgattttcttctttttaagccttttcacggtgtatttaaagcgccctgtcatccgcagagtacaacgcgaagccccgcgaccggctccgcagcgcagtgcggaaccggaaagaagtgctccgagccgtgacgatacgtttacggagatgaatacgggcagatacagagaaaataacgagccggagcgcagagtggaccgacgcgtctgaattctgacggcaagtaaaatgtaaaggcctttgattaaactttcttcagaaagtttatagagtctcggggcaaagccctgaaaaacagaaaatccacacggaaaagagctgccgaattgtaatttcgggcggctctttttgtattcttaccgaccgaaaaaccgcaaaaaagaggggaaagcggtgtgcattttcaaatatacacacttttgtatgtttatgcacaaaaaaccgcagaaaatctaagctctcagcggacatttttcaaaaatgaccttgtaaattttaccgttttgtactatactattatataaagataaccgcctgcggaactgtacaaatgaaacaggcggcgtttctctttgaatagataacgaatgaatgtcttttatttcaaaggcacaaaaacacattcggcgttttcgtgccgaagaaaggaaaatgagagttaatatggatattaacgaaatgacgcatgtggatacgaattacgattcggatcaaatacaggtccttgaaggtctggaagccgtccgcaagcgcccgggcatgtacatcggctccaccggtccgcgcggcctgcaccaccttgtttacgaaatcgtagataacgccatcgatgaagcgcttgcaggctattgcgaccgcatcgatgtgcgcatcctgcccggcgacatcatctgcgtacaggataacggccgcggcgtgccggtcggcgtgcagcaccagacgggtctgccggccgtgacggttgtgtacaccattttgcacgccggcggcaagttcggcggcggcagctataaggtttccggcggtctgcacggcgttggcgcttccgtcgtcaatgcgctttcctcgtggctggaggtcgaggtgcgccagggcggtcacctgtaccgccagcgcttctcacgcggcaacgcggaatatgacctgcaggatctcggccccatcgaaaacccggagcagacaggtaccatggttacgtttaaggctgaccccgagatattcaaagaaaccaccgtttatgattttgccacgctcgaaacgcgtctgcgcgagcaggcatttttgaacgccggcgtcaacatcatcctcaccgatgagcgtgacccggagaacatcaaaagcgaccgtttccactacgagggcggcgtagcaagctttgtggagtacttgaaccgcaaaaaagccgtggaggtcatccacccggatgtcatttatttctccgcgaccgcgccggacaacaactctacctgcgaaatcgccatgcagtatacggacagctttaacgagctgattttgtcctttgcaaacaacattcacacggtggacggcggtacgcacgaagacggcttcaagcgcgccttaacgcgcgtgatgaacgattacgcaagaaagtacaacatcttaaaggaagccgataaaaacctttccggcgaggatgtgcgcgagggcctcacgtgcgtcatcagcgtaaaggtgaaggaggcacagttcgagggccagacgaagggcaagctcggcaatacggaaatcagcggccttgtcagcaatctgatgagcgacaagctgatgacgttccttgaagagaaccccgccgtggcacgcgccattttcgacaaagccatggcggcctcccgcgcaagagaagcggcgagaaaggcaagagaccttgtgcgccgcaaatctgcgctcgaaaacgcaacactgcccggcaagctcgcagactgccagtcccgcaacccggaagagaccgaaatttacatcgtcgagggcgattccgcaggcggctccgcaaagggcggcagagaccgcaaatttcaggcgatcctccccttgtggggtaaaatgctgaacgttgagaaggcacgcttagaccgcgtttacggcaacgataagctcatgccggtcattacggcgctcggcacgggcatcggcgaagaattcgatttgaataagctccgttacggccgcgtcatcatcatggccgatgccgatgtcgacggttcgcacatccgcactttgcttttgacgttcttctaccgctatatgcgcccgcttgtcgaagagggacacgtgtacatcgcacagccgccgctgttccgcatcacgaagaataagcgccactattacgcgtattccgataacgagcgcgacgagatcatgacgcagctgcagagcggctacgatattcagcgctacaaaggccttggtgaaatggactccgagcagctttgggagacgaccatgaacccggagacccgcgtcatgctgcaggtcacgccgagcgatgccgcacaggcggacgaaatcttcactattttgatgggtgataaggtagagccgcgccgcgagttcattgagcgcaacgcaaagtacgtaaagaatctggacatttaagcgcgaaaggatcagcaagcaatggataatatggaagaaaagaaggaaaacctcatacaggtggacctcagagagatcatggagacgtcgttcctcgattactccatgtccgttatcgtgcagcgtgcgctgccggacgtgcgtgacggcttaaagccggtccaccgtcgtattctctacaccatgtatgaaaacgccctgtggccggaaaaggcttacagaaagtgcgcggataccgtcggttccgtactgggccgctaccatccgcacggcgatgcttcggtttatgacgcgctggtgcgtcttgcgcaggatttttccatgcgctatatgctcattgacggccacggcaacttcggttccgtagacggcgacccgcctgctgcataccgttacacggaagcccgcatgagtaagctttctgtggaaatgctgaaggatattgagaaggacacggtcgatttctccccgaactacgacgaccgtctgaaagagccgaacgtgctgccctctcatttcccgaatatcctcgtaaacggctccaccggtatcgccgtcggtatggcgacgaacattccgccgcacaacatgggcgaagtgcttgatggcgtgtgcgctatggtggataaccccgatattgaccttgacggcctcatgcagtacattaagggaccggatttcccgaccggcggcatcatcatgggtcgcagcggcattcgcgccgcatacggcaccggccgcggcagaatttacgtgcgtgcccgcgcagagatcgtggaaaagccgaacggccgctaccagatcgtcgtcaccgagctgccgtatcaggtcaacaaagcaagactcatcgaaaacatcgcagagcttgtcaaggataagcgcatcgacggcatctccaatatcgacgatcattccgaccgcaacggtatgcacattgccatcgacatcaagcgcgaagcttccccgcagctcgttttgaaccacctgtattcgcttacgcagatgcagatcacgttcggcgtcattatgctggccattgtagacggtcagccgaagctgctcaccctgcgcgatattctgcaggaatacatcaagttccagagtgaagttgtgctgcgccgcacgcagttcgaccttaaaaaggcgcaggagcgcgcccacattctggaaggcctcatgatcgcgctcgacttcatcgatgaagtcatcgccatcttgagaaattccaagtctatcccggaaggcaaagtcgccctcatggagcgcttcggccttgacgatgtgcaggcacaggccatcgtgcagatgcgccttggccagctgaccggccttgagagaacaaagctcgaggaagagcttgccgcactgcgcctgaagattgcggatttcctcgacatcatcgcaagcgaagcgcgccgctacggcatcatcaaggatgaagccatggagatgaagaagcgcttcagcgacgagcgccgcacggagatcgccgccatttccggcgaaatggacgtggaagacctcatcccggaggaagactgcgtcttgacactgacgaacttcggctacgtaaagcgccagacgctcgacacgtaccgcacacagcgccgcggcggacgcggcatctccggcatgagccgccgcgaagaagacgttgcgagcgagctgttcattgcaaattcgcatgacttcgtactgttcttctccgacagagggcgcgtgtaccgcttaaagtgctacgagattccggagggctcccgcacaagccgcggcatgaacatcacaaatctgctgccgcttgagcccgaggagcgcatcacctctatgctgcgcgtcacaaagtccgaggaggaagaccacttcctcaccatggtcacaaagaacgccgtcatcaagcgcgttgcgctctctgcgttccgcaatgtgcgcaaaaacggtcttatcgcactcgatctcgccgaggatgacgagctcagctgggtgcgcctgacgagcggcagcgatgatctgctcgttgcaacgcgcttcggcaaggccattcgtttccacgaggccgacgtgcgcgaaatgggccgtcaggcccgcggcgtgcgcgccatccgtcttgcagagggtgacgttgtggtcggcatgagcgtcctgcgcgaaaacggtctcgtgcttacggtttccgagaccggctacggccgcctctcgaaccccgaggattaccgcctgcagcatcgcggcggcatgggtatcctcaactaccacgttgaaaaatacggcaatgtcgcggccattaaggtcgttgatctcaatgacgacatcattctcatcgcagatgacggtgtgattatccgtatcgaagccggttccattcgcatctgtgcacgtcccagcaagggtgttcgcgtgatgaaggtcaacgagggcagcaaggttatcactatggcccgcgccccgcatgacgacgaggaagaaatcagcgccgtagaagacgacggcaccgccgaagagggcgaagatgagcccgtaacggaagcggaagacgtcatccgtgacgatgaacccgcagaagaaacagaagaaaccacggaagagtaattttccgggcaataaaaaagagcgttggtcagaagaccggcgctctttttgcaatttttcaattacgcgttcggatccataatggcgccgtgaccgcagcagtaggtgtacacgtccgtcgggaacaggctctgcaaatatttgcgctccgcggcggcgcggcgggaatcgaggttcacggtggtcattaaatacggtgcaagcaggttaaaatcatactgctcttttgaaaagcccttgatgttcaccatgatgtcgccgctgaaaacaatgcggtgcgcgtcatccacaagcacgatctcgcccttaaagtgcccgccgttgccgtcgaaaacacgcagggtaagaccctcaaactccagcgtgccgcgcggggagatgggtgcgtcgcttgcaggctctgtgtgctcaataacgcgcagcgtgtgcatatcgggtggcgtgtagcccgtcatcagcttgcagatgcggttatacggcgcacaaatgcggttctgctcgcgcagatcgggcagaccgttgttctgcaaggcgaaattcagccgcgtttcctcgttcacatagaatgtgtcgaacaggtcgtgcaggccgcaatggtcgatgtccgcatgcgtgacgataagcgtgcgctccatattgtcaaagttcgggaacaggctgcgaaaaatcttcagcatttcgtccttgtagcacggaaagccgcagtcgatgaacagcagcttgcggtttttctccagaatatacgtgttgcccccgcacggcggctcgatgatgtgcattgtaaacccgccgaacagactgcgctgcgaaatgcgcgcgcggaagttttcacccttaaagctgtgcagcatttcggcgattttgccgatgtacgaaaacgtcttgtgcggcgcttcgcctttttcgtcaaggtgctgcatcaaaaggttggagtctgcaatgagcgcgtccatatcttcctgcggcaggtgcagggtagaagccagctggtgcgcaaacgaaaggtaaaacaccgtgttatcgagcaccttctggcttttgtcgtagtttaaaacacgcatttcgcacagctttgcagcgcggtctaaaaatgccttcgtctgtgcgggatcctgaatgtaaatgccgacctttaaatcctgatggtcggtgtcgttttcctgcccgctcatgtatgtgatgttaaaattaaagctgtcgatgagctccaaaacgggcagcacggcgctcggtacattcggcagatggaattccagcaaaatcgttttgccagggttatcctcgtttaaaatgtagcctacgtcgtttaaacgcacggcgatggtatcaagctgcgcctgtgagccgctgacctccaaaaacagcacgtgcaggtcaacggctttattgtagctgacgcgcgtgatgttcgcgccggactgcgccacaatgcgcgtagccttcaaaaacgcaccggccttgttcggcagtcgcgtgatgaatgttcttttcatgtgcgcctcttaaagcttgccggcctttacgagtgcggcggtcttcaaaatgcccacctgcgttttggaatcggggatttcattgtttaacaccatctcaacggctttgtcgagcggaatgcgctccacttcaaggaactcgtcctcgtctaagtgcatttcgcctttttgggccacacggcacgcccagatgcggatgatctcgccgcagtagccgggagaggggtacagattgccgagcgaaatgtagttttcgcccgtggtgccggtttcctccatctgctcgcgctttacggcctcaaacgggtcttcgcccttttccagtttgccggcgggcagctccagcagcacttccttgtacggataacggaattggcgcacaagcagcacttcattttgttcggtcagcgccgccacgcacacgccgccgttgtgacacacaacctctcttgcactcgttttgccgttttccagctccacggtgtcgcgcagcaccttgatgatgcggccctcaaactttgtttcgcttgtcagtgttttttcaaagagcttcataaactgtcgttcctttctctttatgataaaaactgcttgattttctcgggaagattaccctactattatataaacattttcttaatttcgcaaggcgcgggcgggattctcttgcataaatcccgcgaatgtggtacattttatcagaaccaaaaaatttctcgcggcggtgccgcgtgttatatcccatttttgaaaggaacatgaatatgaaaacctgcattcgtttgctgtgcgccgtttgctgcgccgcgatgctgctcaccatgaccgcctgctcaggcggcaataaaaatacgtcttccgccacggcagaagcgacccctgcgccggagatcactcctgcgccggaggcaacagcggcccccgaagaagaacccacccctgcgcccgaaggcaacacgtcctccgaaacgggcgaaaaccgccacacaagcaccttgccggtaccggaaacgggcagcgaggaattccgcgccgcgtttgaaaacaaccccatcgatacgcagtatgcggacgatatggaaacggcgggctctgttgcgggcatgattactgcgtgcaacacggcttccgacagctggaaagagcagattgattccgtctacacgcagattttggagtatggcgacgataaaacggttgaaaccgtcaaagaggaacagtcccactgggtgaacgagcaaagcaccgctttgcaggacatccgcgattccgtatcggagaatgacccccttgcggccatcaccgtggcagagagcatcatggtctattaccgcacaagggccatcgacctttgcgccgtattatacgatattaacggcacgttggcgttcggctaaaatcaaaaaatacagaggatttgtatatgaaaaaagcattcggcgcaattttgatcgcggttattctcattgtctgcgttgttaccctcacggtgcagcgcggcgaaaacgccatgctggagttcccggagcgccccgcagagggctgcacggtgatgtctcttgaaatcaccgacggcaaagcgcagaccgaagtcatcggcacgtacaacgtaaatgaaaatgtgctgacgatgaacacctcggcgcttgaaaacgcagagcctgccgaaagcggtgaaaactacacatatacgctgccggaaagcatcccgaatttttatttcagtgacaccacgcagggccttttgctctacaagggttatttatacgtggtgacggcgacgacgagcggccagacgctggaaatcataaatctgaaaaccggcaccctcggcggcaaaatctactattcgcagtttttgaaggaagaaatcagcgggagcgcagcgtcggaataagtctcttttattcgttttttgtatttctgacgctgcaaattaagtattagacatttatagaccttttcgttatactggaattatccaaattcagtacacggaggggttttatgttttctgataaagatttaagaaagctcatcgtgccgcttgtcatcgaacagattctggcagtgcttgtgggtacggccgataccgtcatggtgtcttatgcgggcgaatccgccatttccggcgtttcccttgtggatatgttcgcttacatggtcatcacaatcttaacggcacttgcaacgggcggcgcggtcatcgtttcgcagtacctcggcaacaaggagcaggaaaatgcgaaccgcgcggcggggcagctgatggtcggtactttgctcgcttccggcgtggtgtgcgtcatctgcgcggctttgaacagtcaaattctgcaccttttgtacggttcggcagaagaaagcgtcttgcaggcggcggaaacctatatgttcatcacggcgttttcgttcccgttcctcggtatttacaattcttcggcggcactttttcgctccatgaaaaagacgaacatgaccatgtacgtttcgctcctcatgaacgtcatcaacattgccggcaacgcaatcggtattttcgtgctgaaagcgggcgttgcaggcgttgcggtgccgacgcttttgtcccgcgcggtggcgggcatcgtcatgacggcgcttgcgttcaacgcaaagcacgaggtctacctcaaggcgaaaaacgttttctgccgcaactttgagatgctgcgccgcattttgaaaatcgcaattccaaatgcgattgaaaacggtctctttgcgctggggcgtgtgctggtgacaagcatcgttgccatgttcggcacggcgcagattgccgcaaacggcgtggcgggcagcgtggacctcatcgccattatcgtcgtcagcgccatgaaccttgcggtcgtgacggtcgtggggcagtgcgtgggtgcaaaccgctacgacgaagcggaacattacctgaaaaagatgatgaaagtatcgtggattgcaacggctgttctgacggttctcgtgtggctgtgcctgccgatgattttaagctgttttgcagtctccgaggagacgtatcactacgcgtatatcctcgtgatgctgcataatatctttgcaacggtgctgcatccgacgtctttcaacctgccaaacggtctgcgtgcggcgggcgatgccaagttcaccatgtatatcggcatcggatccatggcgatgttccgcatcggctcggcagttttgtttggtatcctgctcaacatgggtgttgtcggtgtttggattgccatgggcatggactggcttgcgcgctccgtggcgttcgtgtggcgcttcaagagcaaaaaatggcagaaattccgcgccatttaatacatttaataaaaaaccagcctgcgcggttcgtttgaacaccgcgcaggctggttttgctttatctgaaattacttattaaacgggttctcggacggatagggcagggacttcggctggttgtagccgatgtctgctacgccgaggtacttgaagacctcaaacagcgccttgccgtagtgaccgaacgccactgcgccgtggtgcgggaagttcttttcgatgagcacatggcggtagaagcggcccatttccgggatggcgaatacaccgatggaaccgaaggagtgggacggtacgttcagcacttcaccctctgcaacgtatgcgcgcagctgggtgtcggccgtgctctggagacggaagaacgtgatgtcgcccggggcaatgtcgccttcgagcgtgccctgcgtaacctcaatcggcagggagcgcgccataatcttctggtacttcatggagcagaacgccagcttcttggagcaggtgttgccgcagtggaagcccatgaaggtatccttctgcgtgtacgtggtcttgcccttgatgtcgctgttgtagaggtctgccgggacggtgttgttgatgtcgagcagcgtgacggcatcgaggctgacgcaggtgccgatgaactcggaaagcgcgccgtagatgtccacttcgcaggaaaccgggatgcccatgccggtgaggcggctgttgacatagcacggaacaaagccgaactgcgtctggaatgccggccagcacttgcctgcaatggcgacatactcgcggtagccgcggtgatcctctacccagtcgagcagggtgatctcatactgtgcgagcttcggcagaatctcgggcttcatgttgcccttgccgagctctttttccatgtcttcgacgaccttcgggatacgcgggtcgccctcgtgcttattgaacgcctcaaagaggtcgagctcggagttttcttcaatctcaacaccgaggtcgtaaagcggtttaatgggcgcgttgcaggcgaggaagttcagcgggcgcgggccgaagctgatgatcttgaggctcttcaggccgatgatcgttcttgcaatcggcatgaactcgtgaatcatgtccgcgcactcgtcagcggtgccgaccgggtattccggaatgtaaacctttacattgcgcagcttcaggttgtagctggcgttcagcatgccgcaatatgcgtcgccgcggccgtccatgaggtcttctgcggattcttccgcggccgcacagaacataacggggccgtcaaagtgctttgcaagcagcgtctcggaaatttccggaccgaagttgccaaggtaaacgacaagcgcgttgcagcctgcgttctttacgtcttcaagcgcctgtaccatgtggatttcgctctccacgatacatacggggcactcataaatttcggtagcaccgaacttctttgtgtaagcgtcgatcagtgcctttctgcggttgacagaaagggattccgggaagcagtcacggctgacggcaacaatgccaaccttgacctggggaatgttgttcataaagtgattcctcctgtaaataaacgggtgtgtatgtgttttgtgccgaaaaaacggcgcaaacgatttgtatgtacaactcatacacggctattgtagcgcatcgcgcggaaaaaatcaacaggaaaaacggggttattattcgtcttcgtctgtaatctccgggcggatgaactcaaaaatgcacagggcgccggcgtttttgcatactttgtactcctctgccgtgcgcagcgtccaattcacttcctgcatcttcattttgtcgcaggcaatgcggtggctgatgttgttcctgaaatgcacgtcatacgcttcaaagtgcgggcgggtgaggacattcgtccacaagtttctccagaacagcgcgcggaaaaagcccttgcactcctcgtccttgccttcaaagtgacccatcagctgaccgcgcagcacatacgggtggttcttcctgaaccaccgcacaatgtacgggtcaaatgattctacgcagtacgggcctttatagttgcgcagcagctcccacacgagcgggcacagcagatcggcatcgtcgtagtgcttcagttcaatgatgagcggcgttctgccgtccacaagcgccagcacgtcgctgaaaagcggtacgcgctcctcggtgttctgcaaacggtactgctgtaattccttatacgtcaggtcgccgatggaaacatccgcgccgcagacgcgctttaagctgcggtcgtggtgcacaacgaccttcttgtcctttgtcagctgcaggtcaaactctatgccgtagcccgcttccacagccgccttaaagcctgccatggagttttccggcacggaaagatctttttcgtgcaggccgcggtgggcatagtcatattttttcatctcggcaaaatcgccgcgcggcgaagccggcgcaatgcagaaaagccacgccagaaagcccagacatacaacaatcagtacgatcaaaattccccaaatcatttttaccctctactttactttttaagtttatttcggcaccttgatttcttccagctttttgcggtactgcaaaggcgtagcgtcgtattcggtgcggaatacttcgatgaaatagctcatggagttaaagccacagtccatggcaatgtcgagcacgcgcagatttgtggcggtgagcagctccagcgcgtggcttaaacgcacgccgttgatgaattgcaccggcgttttcagtgtatactgtttgaacacgcggcagaaatgtccctcgctcatgccggcggcgtgcgcaagctgctgtacggagacggcagaccggtaattttcctgtataaacgcaatggcggccttgatgctgtccgctgcggcgcgcttagaagcgctgatgcgcgccgacacgccgttttgcaccagtgcgccgaacgccgaaagcatggcggcttttacgggaaactcaaaaaacggcgggcggttttccagcattgtgtacgcggtctggaacgcggcggaaacgctttcgtgcaaatttgttccggctctgatcagccgcggcacggtcagctcgccgtccaaaacgggctgtatgtactttacgcgaatgatgtcatttgcggtgctgcacagcaaatcggggctgaacacgatggcttcaaagtaaagctcctcgccggcttccaccggcacggcggcgtgcagctctccgctgttgaaaaacacaatgtctccggcgtgggcctcaaacagatcggtgccgcactgcacggtcagcgtgccctgcatcacacggaaaagctccatttcgctgtgccagtgacaatcaagcgcgtgaaagcggtcttcgcgtcgaatgcagtagttcatcacgggcatcagcgcgtcgccgtggcggcgggcctcccgcatgcggtcaaattgatttttgtccgtaaaacgcacctcctttttaggctcagtggtcaggattgttataaaagcggacaaattagcggtagactttccaaagcatatcgcttatacttatgatagagcaggcgcgcgaaaagcgcaagtgccaataacggaatttttgaatttttttgaaaggcagtgagctgaatatgaaatttacgaaaggctactggatgaaccttcccggcgtgacgaacacggacgccgtgcaggttcgcgaagtcaaggtagaaaacgatcgcgtttacctctacaccgtgccgtaccacgcagacatgcgcgccatgggcggcccgcttctggaaatgtacatttcctctccgcagccggatatcatccgcacggaagcgtaccactttatgggcagcaaccagaaaatgccggcgttcgagctgaacgacgcacactgcgcactggaggtcgagaacaccgaaacgaccgtgacgatcaagagcggcaacacaaagctcgtcatcggcaagaacccgtgcagctttgattactactataaggacaagaagctgacaagcatcggcaaccgcttcggcaacgcgatgatcagcaccatctccaccccggacggcaactacatgcgcgcccagatgaaccttgacatcggcgaaaaggtctacggcctcggcgagcgcttcaccccgtatgtgaagaacggccagaccgtggagacctggaacgaagacggcggcacctgcaccgaaatttcttacaagagcattccgttctacatcacgaaccgcaactacggcgtgctcgtgaacgacccgggcccggtctcctatgagatctgctccgagcatgtcacgcgcgtacagttctccgtgccgggcgaaaagctcgacttcatggtcgttggcggcgacagcatgaaaaacgtgcttgaaaactacaccacgctttccggcaagcccgcactgccgccggcatggacattcggcctgtggctcacctcctccttcacaacgaagtacgacgaagagaccgtcatgggcttcgtaaacggcatgaaagagcgccacattccgctgcacgtgttccacttcgattgctactggatgaaggaaaacgaatggtgcaacttcgactgggatcgggccatgttcccggatatcgagcaccagctgcaggtgatgaagcacgaaaacaacctcaagatctgcgtttggatcaacacctatatcggccagaagtctccgttgtttaaggaagcgaaggagcttggctaccttctcaaaaagccgaacggcgacgtttggcagtgggatctgtggcaggccggcatgggtatcgtggacttcacgaacccgggtgcatggaagtggtatcagtccaagctgcgccacctgctcgaccagggcgtcgattgcttcaagaccgacttcggtgagagaatcccgaccgatgttgtctactacgacggcagcgatccgctccgtatgcacaactattacacctacctttacaataagtgcgtttgggaagtgcttgaagagtacaagggcaagaacgaggcatgcctctttgcaagaagcgccacggtcggcggacagaagttcccggtacactggggcggcgactgctcgtcgaactactcctccatgtccgaatccctgcgcggcggcctttccctgtgcctttccggcttcggcttctggagccacgacatgagcggtttcgagggcaaggctccggcggacgtttacaagcgctgggcggcgttcggcctgctctccacgcattccagactgcacggctccgattcctaccgtgtgccgtggctgttcagcaaggagggtgaagagaacggcgaggaatccgtagccgttgtccgcaaattctccgagctcaagtgcaccctgatgccgtacatgttctccactgcggtcaatacacataaaacgggcgtgccgaccatgcgcgccatggttctggaattcccggatgacatcccgtgcgaagacctcgaccgccagtatatgctcggcgacagcctgatggtcgcgccggtcttcacgaaggaaggcgacgtcacgtactacctgccggagggcaagtggacgcacctgctctcgaacgaaaagcgcgagggcggtcactggctgcgcgagaactacgatttcttctctctgccgctctttgcgagagaaaactccatcgttgccatcggcgcgaacaaccagcagccggattacgattacggcaaggacctcaccctgcacgttttcgagctttccgataaggcgagcgcaaaggtttgcgacagcaagggcaacgatatgctcagcgtttccgcagtgaacgagaacggcgttattaccttcaagttcgacggcaaggcagagaacctcagcgtgctgctgcgcaacgtggagaacgtgaagaacgtctccggcgcagaagtcgagcaaaatgagctcggcactgtcctgaaggtaaacgcagacctcagcgacgttgttgtaacgctctgataaaattaatccaacacccgcagaacggcatgaaaaaccgccctgcgggtgtttttctgcaacgctttatgcgatcaaaaagaaagcgcagagcacggggaaaacccacgctctgcgcttatctttatcttagaaaaattacttcttgctgttcagatattcctgaatggcagaaaagaccttgtcaacatccaggccgtgtacggcacatgcgtcctcaagggactcgtggatggaggacgggcagcctacgcagtgcatgccggactgcatcagcacataagcgatgccgcggtcataatcaagcatttcgcccatagtggtctgctttgtgatttccatctgaaaacatcctttcttggtatagcatcccatcgggtcgccccgatctatccgtataaatcaaactcccgcaaacttcgcgtgaactctaatctacacgaatttagtatacaataggatatgccaaaaagcaagtgtttttgcagatttttggcatatgccttaaattggaagaaacgacaaaacaggggggaaaattcagtcaacttgcaccttgacgctgctgcgcattttcctttataatcaagatagaaaaatattaccattttcagaaaggcggatgattttatgaaaaaacgaatgaccgtaatgctttctttgtgccttagtttgctcctgcttttgtccgcctgcgcttcgggcggcagcacggcaaaaaatgcggaaaaagctgcggccgcgttggcggaaagcatgctgaacgcgccgagtgagcctatgcagcgcttcggcagtattttggaaaacggcgaagaaagcgcccttacggcgtacaaaaatgcttgggaagacgaaaaggcgctgtgcagcgaaaacggcttcacgagcttcattgaagaagtactgaccatgcagcttatggcggacgaaatgaacgagaccgtgaaggtgaccgccgtcaagaccgagccttacgaagaaaaagaccgcgtggtgcgctttacggccgacgtcaccgtgaacgatacggaaaacatgacggttagcggcaaatgtcagttcgatgaagacggcaaagtctcgttcatcgagctcgatacgaacgaacttgagatgacgctcattgcaaacgataacgccgaccccacgcaaaagccgcccgcaaacggcaacgccatcacgttaaatgagtaagcaaaagcccgcaaaaaactgcgggcttcatcttttgaattcggcatgcgcggcacataaaaccgcctgcaagccgaatttctgtttttaaacataaaaaaacgaacatcctattggatgtccgctttaagtgttggcgccaacctatcgtcccgggccgttgccagccgagtattttcagcacaaacgagcttaacttctgtgttcggtatgggaacaggtggaccctcgttgtaatcaacaccaactattctgtttgccgtttcatctgacggctttgttataataccacatccattctgaaattgcaagccttttttcaaaaaaaattcaaaaagttttgagaaacctatatatagttaaaattcaactaatttctctaaatatagaaactgaaaacacaaaaatatccgtatgcacgcggtggtacatacggatatgaaaaaacttttttgaaatttacgtcgtaaaaacaaggtcacattgcttttcaacggggtaggaagtgaagtagaggttctcgagcgggatccatttttccacgaacatcttgtgccgcgcggggccgttgcgttttaaaatgcgtgcgctctgtgtctccggcgaggtcttgagaaaaattttgagatcgtagcgcccgatgagctccgggtgcgtagagtacgagccctctaaaatgttcagcgtcttcggcgtgacctgcaccgcgtcgccgaggtccataacgccgcaatcgaacacgcggtaggaaaacaactcattcttcggaagctgctccagaatatccgacaaaatacgctcccagtgcacattgccgcccggggtggcgtagcgctccggcgtgcgcatgggcatcggcaggtaaaaatcatcggcgtggaacaggttgcagtcgtaaacgctctgcaaaagtgccgcaaacgtcgttttacccgagccgcacagcccgtcgattgcaaccgtcaccggggcttttttcgtcgtcaacttatcgatcgcgatgaatgccggcagaaaatccgcatacgcttttttcaccacgcggtatgccgggtgatacgcacggcggtacgcttcgctgtggtgcacggcagggcagcccgccgcgcggtacgatttcaaaaacgccgcgttttcggatttgtcgaacaaatcggcattttcaagctcgtccaaaagtgataaaaacgccgttttgtccgtgggtgtgtcttcggaagacgctttaaacatagcaaaaagtgttttcggtgaaagctcctgtaacgcgctcaagttgatgcgcgcgtactgctcgccgagagcttccgtgtacggtgcatcaaggttggcaatctccgcttcctttaataaatatagatacgcgccgtcggggtcgctcaaaaagtggccgccgccaaagctcgcctggtacaaaaacttcaccgcgtcctgcacttcggcttcggagtgcgttttcaggtgagcgcacagcgcttcaaacacgtgactcacagcgcagcaagctccttgtagcaatccttcagcgccgggtacagcttcgtgtacatgcggtagaacgcctcgtacttcggcacgttttcctcaatcggctcctgcggggcgttgaggcgaataacacggcggcagccctcctgcacggatgggtacagccctgcgcccacaccggcgaggatggcaacgcccagcgccgggccttccttggaaacgactgtgcgcacggcgcagttatacgtatcggcaagcatctgacgccacagcttcgaggaaccgccgccgccgcaggcgagcatgccgtcaatggaaacgcccatggttttcagcacctccacgctgtcgcgctgggagtatgttacgccctccatcacggcgcggagcatgtcgtacttcgtgtgcatggcggaaaggccgatgaacgcgccgcggcagtccgggtcaaggtgcggagtgcgttcgcccatgagatacggcagataaagcagacggttgcagccgatcggcgaacgcgccgcctgctgatccatcagataatacgggtctacgcccatgccggctgcggtctctttttccgcgccgcagaagttatcgcggaaccacttaagagacagacctgcgccctgcgtcacgcccatcacgtgccatgcgcccggtacggcgcagcagaacgtgtgcacgcggccctttgggtcgatggaaatattatccgtgtgcgcaaacacaacgccggaggtgccgatggttgtaaacgccttgccgtcctccacaacgccggtgcccacggctgctgccgcattatcgcccgcgccgccgaccacgatggtgcccgccgcaaggccggtgcgctttgcggcttcttcggagatgacacccgtcacttccggggattcgtataccttcggcaagagtgccttgtcaatatcaagcttttcaagcacttcgtcgctccagcagcgattcggaacgtctaaaagctgcatgccggaagcatcggagacctccgttgcaaagtcgcccgtcagcatgtagcgcacgtagtccttcggcagcagaatgtgcgcgcactttgcataaatttccggctggttattgcgcacccaaaggattttagatgccgtaaagcccgtcaaagccgggtttgcggtaatctcaatcaggcgctctgcgccgacgcgtgcggtgatctcctcgcactcctttgccgtgcgctggtcgcaccagatgatggagcggcgcagcacgttgccgtccttatccagcatgacaaggccgtgcatctggccggaaatgccgagtcccttgatgtctttgttatcgacgccgctttcggtgatcacggcgtgaatggtatccgccgccgcgttccaccaatcgagcggctcctgctctgcccagccgtttttttcctgatacagcgggtattctatcgttttgctcgcgactacattgccgtcttcgtcaaaaagcacggtttttgtgccgctggtgccaagatctacacctaaaaggtaattcatattaacgtcctttcttttcgaaaaatggtttcaaatgtatagggcattctgcttccattttattttgaagcattttcccatttgtgtcaagccttttttgttgaaaatatgcagactattttaattgaaacgcgcggttttgtatgataaaataaaaaacaagagcttcgtcggcgatttataggggaaaagccgtttgaagcggtcttttggtgtatttgaaaggattgaaacaaaaatggagaaaaaacgatatgacgccgtcgtgatcggcgcgggcgttacgggcagcgccatcgcccgtgagctttcgcggtatcaggcagaaatatgcgtactggaaaagggcgaagacgtctgcaccggcacctcaaaggcgaacagcgccattgtgcacggcggctttgatgccaaaacgggctcgctgaaagccaagatgaacgtcctcggcaaccgcatgatgacgcaggttgcggaagaactggatgttccgttccgcagaaacggcgcgttcgtgctgtgctttgacgaaaacgacatgcctgcgttagatgagctttatgagcgcggtgtgacaaatggagtagaaaacctcaaaattcttaccggcgacgaagcgagagaaatggagcctgcgctcagcgacacggtcgtcgcggcgctgttctgtccgtcctccggcatcgtatgcccgtttgaattgaccttgggctttgccgaaaacgctgagaaaaacggcgttgaattcaaatttgagtgcggcgtgcagaatatccgccgcgaaaacgacctctatattctcgaaaccgaacagggcgagatcgaaacgcgcgccgtcatcaacgcggcgggtgtgcacgccgatgaaattcacgatatgctgctgccgcacgcgttcaccatcaccccgcgccgcggcgaatactgcctgtgcgacaaaaacgcgggcaatttggttgataaaaccatcttccagctgccgacaaagctcggcaagggcattcttgtcacacccaccgtgcacggcaatctgctgctcggtcccaccgccgagaatatcgaagaccgcgaggacacggccacaacgcagagcggccttgcatttgttttggaaaaagctggtatgagcgtgaaaaacgtgccgagccgacagatcatcacatcgttctccggcctgcgcgcctgcgcggacagaggcgacttcatcttagaggaaagcgcgccgaacttctttgaagccgcgggcatcgaatccccgggcctcacaagcgcgcctgccatcggtgtttatatggcggaaatggcggcgaaagcgctcggccttacgaaaaaagaaagcttcaaccccgttcgtcacggcgtcgtgcacctcaattcgctcagcgtcgaagaacgcgccgagaaaatccgtgaaaacccgctctacggcagtattgtctgccgctgcgagacgatctccgagggcgagattgtggacgccatccgccgtccgctcggcgcgaaaacgctggacggcgtaaagcgcagaaccagagccggaatgggccggtgccaggcaggcttctgctccccgcgcgtcatggatattctcgcaagagaacttaacttgccgctgacagccatccgaaagaacgaaaaaggctccgaaatcgtgttcgggaagacgaaatgaggtttattatggaaaataaaatcacaaaatcgcttgtcatcatcggcggcggtcctgcggggcttgcggcggcggtcgccgcggcggaaaacgggcttccggctgaagatatcttaattttagaaagagacgggcgcctcggcggcatcttaaaccagtgcatccacaacggcttcggtctgcacacgtttaaagaggagctcacgggtccggagtacgccgctcgttttgaagaacgcgcaaaggctttgcatatcccgtacaagctcggcgcaatggtactgagcatttccccggaaaaggtcgtcacggcagtcagccgcgaagacgggctgttcaccgtggaagcgggcgcggtcattttggccatgggctgccgcgagcgttcccgcggcgcgctgaatatccccggtttccgcccggcgggcgtgttctccgccggcacggcgcagcgccttgtcaatatggagggttatatgcccggacgcgaggtcgtcattctcggctccggcgatatcggtctcatcatggcgcgccgcatgacgttagagggcgcgaaggtgcacgtcgtcgcggagctccagccgtactccggcggactcaagcgcaatatcgtccagtgtctcgatgacttcggcatcccgctgaagcttagccacactgtgacggagattcacggcaaggaccgcgtaacgggcgtcaccatcagcgccgtggacgacaaattaaagcctatcccgggcacggaagagtattattcttgcgatacgctgcttctgtccgtcggtctgatcccggaaaacgaactcaccctcggcgcgggcgcaccgctctcccgtgtgacgaacggccccgttgtcaacgaaagcctcgagaccggcgtgccgggcatcttcgcgtgcggcaacgtgctgcatgtgcacgaccttgtggactatgtttccgaagaagccgcgcaggccggccgtgccgccgcaaagtacgtgcagggcggcagcaaagaaaccgcagagccgctttcgggcggcatcaagctcgaagccaagggcggtgtgcgctacactgtgccgagcatcattcaccccgaaaatatgccggatacgctcacggtgcgcttccgcgtgggcggcatctataaaaattcgttcatcagtgtctatttcggcgatcaacgcgtgcagcaccgcaaaaagaccgttatggcaccgggcgaaatggagcaggtattgctgaaaaaagcagaccttcaaaatattgattttgacaccgtcaccgtcacggtggaagcggaataaggagggcattactatggaaacgaaatcgtttatctgcatcaactgccccttgggctgtccgctgaccgtcactgttgaaaacggcgaggtgaaaagcgttacaggcaatacgtgtaagcgcggcgagctctacgccgtgaaggaagttaccgcgcctgcccgtaccgtcacgtctaccgttcgcgttttaaacggtgaacgcccggttgtcgccgtgcgcacgaaaacggacatcccgaagggtaaaattttcgactgcatgaaagccatcaacgcagcggagatcaccgcccccgtccatatcggcgacatcgtcattgaaaacgtttgcggcaccggcgtaaatgtcgtcgcatccgcggacgacgagttgggttaaaagtctttgattaaactttcttcagaaagtttatagggcctcggggcaaagccctgaggcgcgctccgcagagcgcgaaatccttttgcttaccccaaaatcaggactgggagaaaccaatgcttcgcattgctataaaacaatccagtgaattgttcgtccgagggagaccctattaaggggtctccctatgaatttgcacggcaaattcataaaagataaaacttttagaaagagagaataaacgtatgaattataccgatatcaacgcaaaaatcgtggacagctgggtgcaaaacggctgggagtggggcaggcccatcagccacgaaacgtttgaaaaagcaaaaaacggcgcgtggggcgtgtacctcacgccgacgaaaaccgtgccgcacgcgtggttcggcgagatgcgcggcaagaaaattctgggtttagccagcggcggcgggcagcagattcccattttcacggcgctcggcgcagactgcaccgtgcttgattattccacggagcagctaaagcgcgaagaagaggtcggcaagcgggagggctatactccaaagtgcgttcgcgccgatatgacaaagccgctgccgtttgaagacgggacgtttgaccttatttttaacccggtttcaaattgttatgtagaagaactggagccgatctggaaagagtgcgcccgtgttctgaagccgggcggcgttttgcttgtcgggtttgataacggcttcaactatcttttcgacgaggacgagacggttatcaaatacacgctgccgtataaccccctgaaagacgaggcgctgtaccgggaagcgatggatctggacttcggcgtgcagttttcgcacacactggacgaagaaatcggcggccagctgcgcgcgggatttatgctgacggatatttatgaagacacaagcggcggaggctttctgcacgagcacggcgtgccctgctttgtcgcaacgcgctgcgtgaaaaagtaatagctgaataaaaaccgtaaaaagcacggctttcccgaaaaacggcggaaaagctgtgctttttaaattttgccgcaaaaatattttttgaaatcacacctttgaaaataaaagtataagtgagaaaaacgaagaataaacgagattagaattcgcagcttaaaaaaccgcaaaaaagcgcttgacaagccgtttttcgtgtggtactatcatttagcgcccatgggaaagctatgggcattttcagagatttcgtatcgcagcgcacaaagcgtttgccggtaccgagataatttaaatcaattttggaggtaaacgctatgtccacttatatggccaaggctggtcaggttgaccgcaaatggtatgtaattgacgctgcaggcaagccgctcggccgcgttgcagcacaggccgcagttcttctccgcggcaagcacaagcccacctttaccccgcacgttgactgcggtgaccacgtcatcatcatcaactgcgctgaggctgtcctcaccggcggtaaggctgaaaagaagtattattatcatcacacgggttatatcggccacctcaaggctgtccgttatgacaccctgatgcgcacaaagccggaaaaggcgatggagcttgctgttcacggcatgatcccctcgaacaccatcggcagagctgcagaagcaagacttcgtgtctacgccggcagcgagcacaagcacgaggcgcagaagccgacggcttgggaactttaataggaggtaaacgaatatgtacgataaggcaccttatttctacggcaccggcagaagaaaaagctccgttgcacgtgtaagaatttaccagggcaccggtaaggtcacgatcaacgaccgcgatatcgacgattatttcggccttgataccctcaagacgatcgttcgtcagccgctcgttctcaccggtaccgaagagaagttcgacatcgtttgccgcgttgcaggcggcggtgttaccggtcaggccggtgctatccgccacggtatctccagagctctgctccagtacgattccgagaacctccgcgctacgctgaagaaggccggtttcctcacccgtgacccgagaatgaaggaaagaaagaagtacggtctcaaagcagctcgtcgcgctccgcagttcagcaagcgataatcgactgctcagactatatcaaaatggttcaaaaagcccggaaaatcaaggttttccgggcttttgctatatctaaacgggctgatatggtttgacctcatttgaccaaacgagagccgttttcacccaatttttagtggtccgcaagtggttaactggccaaaaagagggcgaaaagaggggtaagtggttcccaaagtggttaaccgagagccgattttgggggtgcttttcagccctccttcccttcgttttttggctgtggcagtttggcatagtttgagctaatttgaataattgaatatgaatttgatgtagcacacagatcataaatgactgggtgcttttttcatttcaggaactcgtattccggcgatagaaagagccgtcacttcactttttattttggagtggcggctttttctatttccagaagcaacagcaacaattagaaatgaggtgaagttaatgaacacgcaaatcattgccattgccaaccagaaaggcggcgttggcaagacaacgacctgtgccaacttgggaatcgggctggcgcaggccggaaagaaagttctgctgatcgacggggacccgcaagggagcctgacaatcagcctgggccatccccagccggacaagctgccctttacgttgtcagacgctatggggcgtatcctgatggatgagccgcttcgtcccggcgagggtatcctgcaccacccagagggtgtagacctgatgcctgcggacatccagttatccggtatggaggtatccctggtaaacgccatgagccgtgagactatcttgcggcaatatctggacacgctgaaggggcaatactcccatatcctcatcgactgccagccctccctgggcatgctcacagtcaatgcgctggccgctgcgaacaggatcatcattcccgttcaggcggagtatctgcccgccaaagggctggaacagctgctctccacggtaaacaaggtaaagcggcagatcaaccccaagctccagatagacggtatcctgctgacgatggtggacagccgaaccaactttgccaaagagatctccgcgctcctgcgggagacctatggcagcaagatcaaagtattcggcacagagattccgcactctgtccgggcaaaggaaatcagtgcagagggaaaaagtattttcgcccacgaccctggcggcaaagtggcagaggggtatcgaaatctgacgaaggaggtgttgaaacttgaaaagcagcgcgaaaaaaatagagctggcctcggtagatgatctgttctccaccgaagaaggccgtcaggatgcaaagctggaaaagattcaggagattccgctgtctgagctgcatccctttaggaaccacccattcaaagtcaaggatgacgaagccatgatggagaccgctgacagtatcaagcagtatggcgttctggttccggcgattgctcgaccggacccagagggcggttatgagctggtagccggacacaggcggcacagagccagtgagctggcaggcaaggagaccatgccggtcattgttcgggatttggatgatgatgccgccacgatcattatggttgacagcaacttgcagcgagaaagcttgctcccaagtgaaagagcctttgcctacaagatgaagctggatgccatgaaaagacaggctggcagaccgagtaaagaaaatgtgtcccaagttgggacacaaaagcgatcagaccagttgcttgctgaacaggtggggcaaagtcgaaatcaaattcagcgctatatccgtctgacagagttaattcctgaattgatggatatggtggatgaaaagaagattgccctgaaccctgcctatgagctgtcctttctcaaaaaggaagaacaggtagacctgctggacgcgatggacagcgaacaggctaccccttctctttctcaagcccagcggctcaagaaatacagtcaggaggggcatctgaccctcgatatgatgcgtgtcatcatgggtgaggaaaagaaaagcgatctggaccgagtgacatttacctctgacaccttgcggaagtatttccctaaaagctatacgccccagcggatgcaggaaactattatcaagctgctggaacagtggcagaaaaaacgccagagagatcaggaacgatgaaaggagccgcctatgagggatatttcagcccgcgagctgaaaggacacaacattcttgccgtggagcgttttcaggataacacccgctggatgattgagttttccgtcctgcgtcccagcacagcttacggtagccccggagaggaaatacgactgtttttgactgaggacgggtatcaggccgccctgcaaagccagcagcgtcgggagatcaagatcaagcgttacgctcgtgtgattgagggacatatcctcgatttcaaaccgggaaaacaccgccgccactcataaacaaatcattactgcgaaaggaaaggattgaaatgtgtactgtaaaggaaatccgggaagcaatccgggaggattgccattcccagcatggtatggaatttatagagattgaccgtgttctgcaaactctgccattctctcagggaaatgacctgttggacagaccgcccattcccaagcgcccctaccggcgcagaaaaagtgaacaaaacagctaactgccacaattctttttacaggattgtggcttttttcataccctgagaaatttggaaggagtgaggtcaatggccgtatttcgcattgaacgaaccagagattataccgtgatgagcaatcaccatttacgcaacgggaaactgtccctgaaagccaaggggctgctttccatgatgctgtccttaccggaggactggaactataccaccagagggcttgccgccatctgcaaagagggcgtggacgctatcggcggcgcgctgcgggagctggaaactgccgggtacattgtccgccatcagctgcgagaccggcagggtcggatcagcgataccgagtatgttatctacgagcaaccacagccgaagaacccggatacgccccagccggatacggcttcaccagatacggaaaacccggatatggtaaaaccggatacggaaaagcccacagaattaaatatagagaaatcaaatacagaaaaaacaattacttatggatcaagtaccgattctattcccttccgggagccagcggcagcacagctgccggaacggaaaggaagggatgcgatgtctgtctcagagatggaaagttatcgggatttgattctggagaacatcgagtatgaccacctgtgccgggagtttaccacctaccgggaggacctggacgagattgtggagctgatggtggagaccgtctgcgccaagcggaaaaccacccggatcgctggcagcgacttcccccatgaggtggtccgctcccgttttttgaagctggattgctcccacatcgagtttgtcatggaatgcctgcggaacaataccaccgaaatccgcaacatgaagcagtatctgcttgcggtgctgtttaatgcgccgaccacgatcagcaaccactacaccgcacaagtcaaccacgatatgtacgcaggcggctggtaaacagccgcttttctgctacccgaaaataccgggagaaaggattttgccatgaaacgacctcttgcctacattacggctccctggagcaacagccagtatgagaacgccgagagcgctgcggcctactgtcgtcaggtgtacgacgccgggtattcgcccatctgcccggtgctgttcctgcctaccttcctcaaggacgagattccccaggaacacaaggacgggctggatatggcgcgggactacctgcgccggtcccatgtgctggtggtctgcggccacggcatcgacgagaccgtgaagaatgacattgccaccgccgagcgcctgcggatcaccgccaccaccctggacggtatcctgaccgtgaagggccagggacgcgggaaaggaggcgcacgccatgcctgagcgtaagaccgtgggccagctgatggaggaaatgcgcctcaaagccggggcgcagaactaccacggccatgagtacatggatttggagcggtttgccgatgacacccggcacatgattatcttcgatgtgctgaccgacgattccccggtgggctggaaaggtgaacggacccgcctatttctgacggaggccggataccagaaaagcctggagaaccaggaaaagggccacatcaagattctcagccatgccaaagtgcgccagggccatctgtactatgaccgctccgaccagctgcgctgaaaggagcctgccatgctgaaatacctgctgcggcggttggtggtcccgccttagtatcaagtgccacccctgcaaaatccgtggaaaggaggcgatgacctatgcaggaggaagtggaaaacaggactttgacgctggtagtcagcggaacaaagtttaccgggcggttgatgaaagccgccatcaccaagtaccttgcccaccgcaaggaaaagaagctgcaaaagcagaaaagccgggatacccccgtgattccccacggcaagcagacggtgaagcagctgatcggccagaatcagggcgtttccaacatcgagatcaccgacccctccatcaaggagtttgagaagatcgcccggaaatacggcgtggactatgcggtgaagaaggaccgcagcagctccccacccaagtacctgatctttttcaaaggtcgtgatgcggatgcgctgacagcagcctttaccgagtacaccggcaaaaaggtcaaaaaagcagagaaaacagagcgtccgtctgtgctggcaaagctgaaccagttcaaagagctggtcaaaaatgccgtggtggaccgcaccaagcgaaaggagctggaacgatgaaaaagcagcttgacatcaaaaagctcctgattttgaacctgccgtatctcctgatgggcttgtttgccaccaacttcggggaggcatggcgcatggtgcagggcgcggacgcttcccaaaaggcgctctccctgatttctgtcttgccggtggcgctggcaagctggtggcccagcctgcacccgctggatttactggtgggcctgtgctgtggcgctggtctgcggctggcggtgtatctgaaaagcaaaaatgcaaagaaataccgccacggcatggagtatggttctgcccgatggggaacccacgaggacattgccccttatgtggacccggtattccagaacaatgtgattctgacgaaaaccgagagcctgaccatgaacagccgcccgaaagaccccaagactgccagaaacaaaaatgtgctggtcatcggcggctccggttccggtaagacccgattctggctgaaacccaacctgatgcagatgcacagttcctatgttgtgacggacccgaaaggaacaattcttgtggagtgcggaaaaatgctccagcggggcgcacccaagctggggaaagacggaaagcctatgaaggataagcacggcaaggtcattaatgagccgtaccgaatcaaggtcctaaataccatcaacttcaagaagtccatgcactataaccctttcgcctatatccatagcgaaaaggacatcttgaagctggtaacaacgctgatcgctaataccaaaggcgaaggcaaggccggagacgatttctgggtcaaggcggaaacattgctgtattgcgcgttgattggctatatccattatgaggctccggtggaggaacaaaacttctccaccctcattgagttcatcaacgccatggaggtccgggaggatgacgaggagttcaaaaaccccgtggacctgatgtttgatacactggaagccgagaagccaaatcactttgcggtgcgccagtataagaaatataagctggccgccggaaaaacagccaaatcgattttgatttcctgcggcgctcgccttgccgtgttcgacattgcagagttgcgtgaggtcacggcttatgatgagctggagctggacactctgggagacaggaaaactgccctgttcctcatcatgagtgatacggacgatagctttaacttcctgatctccatgtgttatacccagcttttcaatctgctctgcgaaaaagcggacgatgtgtatggcggcaggcttccggttcatgtgcgctgtttgattgatgagtgtgctaacatcgggcagattccgaagctggaaaagctggtggccaccatccgaagccgtgaaatctctgcctgtctggtgttgcaggcacagagccagctcaaggcaatttacaaagataatgccgataccatcatcggcaatatggatacttccatcttcctggggggcaaagagccaacaacgctgaaagagctggcggctgttctgggaaaggagaccatagacacttacaacaccggagagagccggggacgggagacctcccactctctcaactatcaaaaattgggaaaagagctgatgagccaggacgagctggcagttatggatggcggcaagtgcatcttgcagctgcgcggtgtgcgtccgtttctttcagacaagtatgacattaccagacaccctaatttcaaatacacagctgatgcagacaagcgaaatacctttgatattgaagcatttttgtctgccagactaaaactcaagcctgatgaggtctgcgatgtatatgaagtagacacggagggcgtgtaatacggttccgctgagaaaggagtgatcgtatctatttgccgcaactgcctctgttgaggccattggcgtacaaagcgggcaatcatcaacaaaataatgaaaaaggaggacagccggaatcaggctctcatatatcgagggcagattgttccggcttttgtatgcctatgaaacatgacaaacctattttttaatcagattccggctaacaaactatatggcattttttgaacaggcaattaccgttcttcagactctcgttatcgctctgggcgctggtcttggtatctggggtgtcatcaacctgttggaaggttacggcaacgacaaccctggcgccaaatctcagggcatgaagcagctcatggccggcgctggtgtagccgtagtcggcatggtccttgtacctctgctctccgggcttttctctgtctaagcgtctctgcatgaaatccttgccgctcccgcagttttgcgggggcggcggaaaggaggttgacaccgtatggatttcttacttgaagccctgacaaattggctgaaagaaatgctggtgggcggtattatgagcaacctttcggggatgtttgacagcgtaaaccaacaggtcgcggatatatccgtacaggtaggacagaccccacagggatggaatggcagtattttcagtatgattgagaatctgtccaactccatcatggtgccgattgcaggcgtgatcctggctattgtgatgaccgtagacctgatccagatgatcgcagacaagaacaacctgcatgatgtggatacctggatgattttcaagtgggtgttcaaatcagccgctgccatcctcattgtcacaaacacatggaatatcgtgatgggcgtctttgatatggcgcagagcgtggtggcacaggcggcagggatcatcggttcggatgcgtccattgacatttcctcagttatgaccgatctggaaccgaggctgatggaaatggatctgggaccgctgttcgggctttggtttcaatccctctttatcggcattaccatgtgggcgctgtatatctgtatctttatcgtcatttatggccgtatgattgagatttaccttgtgacttcggtggctcccgtcccaatggctgccatgatgggcaaggaatggggcggtatgggacagaactacctccgctccctgctggcgctgggctttcaggcgtttctcatcatcgtttgcgtggcaatttatgctgtgctggtgcagaacatcgctctggaagatgacatcatcatggcgatctggagctgcgtgggatacaccgtactgctgtgctttacgctgttcaaaaccggcagtctcgcaaaatccgtctttcaggcacattaaaacggaaggaggtttccacattggcttatgtacccgtacccaaagatttaaccaaagtcaaaaccaaggtcatgttcaatctgacccgaaggcagctggtctgctttatcgccggggcgcttataggcgtaccgctgttctttttgctccgtgagcctgcaggaaacagtatggccgccatgtgtatgatgctggtcatgatgcccttcttcctgctggccatgtatgaaaagcatggacagcctctggaaaagatcgtcggcaacattctcaaagtggctgtgatccgtcccaagcagcgtccctaccagaccaataacttttatgccgtattaaagcggcaggaaatgctcgataaggaggtgtatgacattgttcaccgcaatgaaaagctggctgcgccgtctgctgggaaaaccggaagaaaagaccgtgcagccggtaaagacaaagaaaaagctgtcccgcgccgataagaagcagattgaagcggccattgcccgcgccaaccgcacggacaaaaaaggaaaatcggcacaggacagtatcccctatgaacggatgtggccggacgggatctgccgcgtatcggacagccactacacaaagaccattcagtttcaggacatcaactatcagctctcccaaaatgaagataagaccgcgatctttgagggctggtgtgatttcctcaattatttcgacagctcgattcacttccagctgtcttttttgaaccttgcggcatcggaggagacctttgccaactccatttccatcccaccccagggggatgcctttgacagtatccgtgaggaatacaccacgatgctacaaaatcagctggccagaggcaacaacggtctcatcaagaccaaatacctgacctttggtatcgacgcggacagtatcaaagctgccaagccccgcctggagcgtattgagaccgatatactcaataacttcaagcgtcttggtgtagccgccagaacactggacggtaaggaaagactttctcagcttcatgcggtattccacatggacgaacagctcccattccagtttgaatgggactggctggccccttccggcctatctaccaaggacttcatcgcaccaagctcctttgagttccgcaccggcaagcagttccgtatgggcaagaaatacggggctgtttcttttttgcagattcttgcaccggagctgaatgaccgtctgctggctgattttctggatatggaaagctcgctcattgtgagtatgcacattcagtcggtggatcaggtgaaagccattaagacggtaaagcgcaagattaccgacctggaccgcagtaagatcgaggaacagaaaaaagcagtccgcgccggatacgacatggacattattccctctgaccttgccacctacggcagtgaggcgaaaaagctgttgcaggatttgcagagccgaaacgagagaatgttccttgtctcctttttggtgctgaacacagcggacaatccccgtcagcttggcaacaacatctttcaggcaggctctattgcccagaagtataactgccagctgaccagactggacttccagcaggaagaagggctgatgagctgtctgcccctgggactcaatcagattgagatccagcgagggctgaccaccagttctacggctatctttgtaccgttcaccacacaggaattattccagaacggcaaagaagccctgtactacggcatcaacgccctgtccaacaacctcatcatggtggacagaaagctgctgaaaaaccccaatggcttgattttgggtacgccgggttccggtaagtctttcagcgccaagcgtgagattgccaactgctttttgcttaccaatgatgatgtcatcatctgtgacccggaagctgagtacgcacctcttgttgagcgtctgcatgggcaggtcatcaagatctcgcctacctcaaccaactacatcaatccgatggacctgaatttggactactcggatgatgaaagcccgctgtccctcaagtctgactttatcctcagcttgtgtgagctgattgtgggcggtaaggacggattgcagccggtgcagaaaaccatcatcgaccgctgtgtgcgtctggtctatcagacctatctcaacgacccgcgcccggagaatatgccgattctggaggacctatataacctgctccgttcacaggaggaaaaggaagcccagtatatcgccacggcccttgaaatctatgtaaccggctccctcaatgtgttcaatcaccagagcaatgtggacatcaataaccgcattgtctgctatgacatcaaggagctgggtaagcagctgaaaaagatcggtatgcttgtggtacaggatcaggtatggaaccgagttaccatcaaccgcgccgcccacaagtccacccgttactacatcgacgagatgcacctgcttttgaaggaggagcagaccgccgcctatacggtggaaatctggaagcgattccgtaaatggggcggtattccgacaggtatcacccagaatgtcaaagaccttttgagcagccgcgaggtagagaacatctttgaaaactccgacttcgtgtatatgctcaaccaggcaggcggagaccgtcagattttggcgaagcaactgggtatttccacacaccagcttagctatgtgacccactccggtgagggcgagggcctgctgttctatggctccacgatcctgccgtttgtagaccacttcccgaagaacaccgaactttaccgcattatgaccaccaaaccccaggaactgaaaaagaaggaggatgaatgattatgaaccccaacattttgaataaaaacccgctgatgttttttgacagggcggtaaatgcccaacgcagccagctgcttacggtcatggctgatgcggtaagtgagtgccgcacggcggcagatcaggcagccgaactgaatgagaccggtcaggtggggcttctccgtctggcagaggtctggagcgccatccgtgccaaggaaggcatgggcggtctggttctggaaggaaccgaagcgaagatcctgtccgatgtggtggcacagttttatgcctacctgtccggctgtatgttcaacgatcctgtggggatggccatttatgcagagctgcactacatgatgtcctccctcatgctgggagaatggtttgaataaggaaccgcgcctgcgctttaccgatgaggaacggtctgacccagcgctggaaaagccgatttgtaaagcggagaaagctgcggccagagcagataaggcgcaggagaatattccaaagaaaaaggtcaggcagacggtcattgacccggataccggaaaaaagacctcgaagctgacctttgaggacaagaaaaagccaccctccaaagtttctcaaggggtcaaagaagctcccgtccatctggtcgcgggcaagctccacaaagagatccgggaaacagaacaggacaatgtgggcgtggaaagcgcccacaagtccgaggaggcggtggagaccagcgcttatctggtgcgggagggctatcgcagccacaagctgaagccctaccgcaaagcagcccaggcagagcgccaactggaaaaggcaaatgtaaatgtcctgtaccagaaatccttgcaggaaaatccccagttttccagcaatcctctttcccgctggcagcaaaagcaggccatcaaaaagcagtatgccgctgctaagcgcaccggtcagactgccggaaataccgcccaggctgcgtccaaaaccggaaaagccgcaaggacgataaaagaaaaggcacagcaggcaggggcattcgtcatgcgccacaaaaagggcttcttgatcgcaggggttttgttcctcatcacctgtatgctgatgaataccatgtcctcttgttccatgatggcgcagagcataggttccgttctctccggcaccacctatccgtcggatgatccggaaatgctggcggtggaggcagattatgcagccagagaagcccagttgcaggagaaaatcgacaacatcgaaagcagccacccagggtatgacgagtatcgctatgaccttggcatgattggccatgaccctcatgagctggcggcatttctctctgctgtcttgcagggctatacccgacaaagcgcccaggcagagctggcgcgtgtgtttgcagcacagtatcagctgacgcttaccgaggaagtggagatccgctaccgcacggagacctccaccgacccggagactggcgagaccacctcagaagaagtaccctatgagtattacattctgaatgtgaaactcaccagcaagcccatttcagctgtggcgtcggagctattgaccccggagcagatggaaatgtatcaggtctaccgacagaccatgggcaataagccgctgttgtttggcggcggttcccctgataccagcggctcggaagatctatccggtgtgcagttcattaacggcacccgccccggcaatcctcagctggtggaactggcgaaaagtcaggtgggcaatgtgggcggttatccctactggagctggtatggctttgacagccgcgtggaatggtgcgcctgcttcgtatcctggtgctataaccaggcaggaaaaagtgagcctcgctttgcaggctgtgagtggcagggcgttccgtggttccagtctcatggacaatggggtgcaagaggctataacaatctggcccccggagatgcaattttctttgactgggatttggatgggacagcagaccatgtaggtatcgtgatcggtacggatggcagccgtgtttataccgtggagggaaattccggcgatgcctgcaagattaaaagttatgacctgaattatcaaagcattaagggctacggcctgatgaactggtaacagagatttttaagaaggagtgatagacgatggcaaagaacaaaattgagcgcattgaccatgagattacaaaggtccgcgagaagatcgcagagtatcaggaaaagctcaaggcgctggaagcacagaaaaccgaggcagaaaatctggagatcgtccagatggtgcgcgccctgcgtatgaccccgacccagttgagcgccatgctgtccggtggcacagttcccggcagtttggctgatgacaataacgaacaggaggaaaacagctatgaggaataaacgattgctccgaacactttccgccttttgcctgacaatggttgtggcatttggctttacgatccctgcttttgcacaggggtcagaacaggctccggcggcaccggcagaggattctaccaatgacagcaatgtgattgtggaagaaacagaaccagcaccggcacttacaccggaggggaatgcggcattggtggatgattttggtggcaataagcagctcattactgttacgaccaaagctggaaattacttttacatcctgattgatagggcgaatgaggataaaaagactgctgttcactttctgaatcaggtggatgaagcggatttgatggcactgatggaagatgaaaatgtcaaagagaagccgtctgctgtgtgtagctgcacgacaaaatgtgaagcaggggcagtcaatacggcttgtccggtctgtgcaactgataagagtaaatgtacgggcaaagcaccggaacctccggcagaaacaccggagccggaaaaagagaagcctgccggactgaacccggctgcgatagtccttttgctggctctgcttggaggcggtggcgtatttgcctacttgaagctcgttaagaataagcctaagaccaagggcaatgacagtctggacgattatgattatggcgaggaagattccgaggaatgggaaaccgaggatgaggagtcggacgagccggacgctgatgggggcagcacagaagaagatgatgaggacagtgtgaaatgacccgtttcacagacagtccctatgaacgcatgatgacacgcaggccggagggcgggaaggaaatttcccgtcctccttctttacctcacaaccacccctgctatggttgcgggaattatggaagtccctgtgtaggtatctgccatcgtgagatggaacgatggctcaaagaaaggaaacgaaaaaaatgagtgttctgattatatttatcaagctgattgctgtttttgacctactggtaattgctgtgtattttggcggcgacattctttctaccatgttaaacaaacttcagagaaagccaaagcaagatgacccctttgatttctccttagataccatgacagtttcattgtccatagattctattcgtcagctttattccggtgacgcggcagattttgtggaagaaaagattctgccaaatgcggagaaaacaatggccgttttgacggaacaagaacggacggcggctcgtctgctcttatccgctctaatcggttttcttgcagcagaagctcctatggatgaacagagctttcctttgatgatggaacttctgaactgcatggaaggggaaaaagaagatggttgtcaggatgcagtagatagtttacttgaagatgccgcctgcaatacccgccgtcacgaagaatattacagcaattatcaacgctaccagctgatgcaggtggataaaacccgtgtcattttggcttgccgtatcatcatcaatgacctgctggggaaactgtaccgctatgactaccggtttggttataacctgctactggatgaggaaaacagcatagagaaaaaactgcacacgcctgtgcgggaagaatgggaggctgaagatgatgagatataaactggtaatcgctgaaaaaccatcggttgcacaaagtctggctgcggtaatcggtgcaactgctcgtaaggacgggtatctggagggtaacggctggcgtgtcagctggtgcgtaggccatctggccggtcttgcggatgcagacagctatgaccccaagtatgccaagtggcgatatgatgacctgcctattctgccggagcattggcagatggtagtgggaaaggataagaaaaagcagtttgatattctcaaaaagctgatgaacgccccggatgtgacggaggtagtaaatgcctgtgatgccggacgcgagggcgagctgatcttccgcagcgtctatgagctggcaggctgccaaaagccgatgaaaaggctctggatttcttcgatggaggactccgccataagggagggctttgcaaacctgcgcccaggggtagattatgatggacttcgggatgctgctctctgccgtgccaaggccgactggctggtagggatcaatgctacaaggcttttttccgtgctgtaccaccgcaccctcaacatcgggcgcgtgatgtctccaacgctggcgctcattgtccagcgagaggctgagatcgacacctttaagccggttcccttttataccgtggcgctggagctgcccggtcttaccgtatccggggagcgcataagtgaccgagcaagcgcagaacagctgaaagaagcctgccagggtgcagctgtcacaatcaaaaaggtggagtgcaaggaaaagtccgaaaagccgcctgccctctatgacctgactactctgcaaagagacgccaaccgcctgcttggatttacagcccagcagaccttggactatctgcaaagcctgtatgaaaagaagctctgcacctatccccgtactgacagccgctatctgactggtgatatggcagacagcctgccggtgctggtcaagctggttgccaatgctatgccgtttcgcaaaggaatcgccattacctgtgatccgcagacggtcatcaacgataagaaagtaaccgaccaccacgcagtaatccctaccagaaatctcaaggatgcagacctttctgcccttcctgcgggagaaaaagcagtgctggagctggtggccctgcgtctgctgtgcgccgtggcttatccccatatctattcggaaaccgttgtgattgcagcgtgtgccggtggggaatttaccgccaaaggaaaaacggtgaggcaccccggatggaaagcactggaggacgcttaccgtgccaaaacgaaggatgcagagccgaaaaaagagggcgtagagaaagccctgccggagctgaccgaaggacagaccctttcggtttctgcggcaatcgtcaaagaaggcaaaagcagtccgcctcagcactttacggaggacaccctattgtccgcgatggagactgccggaaaagagaatatgccggaggacgctgagcgaaaaggtctggggacaccggccacccgtgccggtattttggaaaagctggtatctgccggttttctggaacgaaaaaagagcaggaaaacggtgcagcttctcccttcccacgatgcagtttccctgatcaccgttctgccggaacaactgcaatcgccgcttctgactgccgagtgggagtaccgcctgggcgagatcgagcgcgggcagcttgccccggaggagtttttagacggtatcagtgccatgctgaaagatctggtggggacttatcaggtcatcaagggaactgagtacctgttcactccgccccacgaggtggtgggcaaatgccctcgctgcggcggtgaagtggcagaactgcaaaaaggcttcttctgtcagaatgattcttgtaaatttgcaatctggaaaaacaacaaatggtgggctgccaagaaaaaacagccgaccaaagctgtggtgtctgcgctgctgaacgatggccgtgtccgtgtgacggggctatattcggagaaaaccggcaagacctacgatgccactgtggttttggaggacgatggacagtatgctaacttcaagctggaatttgaccagcggaaaggaggcagccgatgaagctctctttagtggaacgggaaaccattctcctctataaccaggcagaaccaatggctgaggtctatacccacgatccccgtctgatggagaagctggaactgttggcaaaaaagcaccccgaccagatcacccgaaaggacgcccataactttaccgtccccaagcggtgtgtatcagtccgggagccatacagcgcagaacgccgcaaagctgccagtgagcgtgcgaaagctgccggataccagcctcctgtgagaaagcccagcagttaaaggcacatggcagagaatgtatttgaagcagtcaagcagtcggtcagcaccagagaagcggcagagttttattggataaaagtcaggcgaaatggcatggcctgctgtccttttcacgatgataagaaccccagcatgaaggtagaccagcggttccactgctttggctgcggtgaagatggggatgtgatcgactttaccgcaaagctctttgacctctccccaaaagaagcggcggagaaactggcacaggactttggcctgatctatgacagtcaggccccgccccgcaggagatatgtccggcaaaaaaaacgaggcacagaagtttcgggaggatcgacagcgctgttatcgcgtactgtccgattactactatctgctgaaaaaatgggaagccgaccgttctcccaggacaccggaggaagaaccgcacccccgctttgtggaagcaatccagaagaaagcctatgtagagtacctgctggacctttttctttatgaaagtgaagaagaacaaaaggcatggattgcagaacacacagcagaaatcacacacttggaaaggagattgaaaatcatggctgagaataaacccaccaaccgagaacggctaagggaaatcacagatggcatcgagcagggcatcaaagaactgtttgagagtgaaaagtatatgcgctatctgtccgtcatgtcccgcttccaccgctattcggtaaacaacaccatgctcatctatatgcagaagccggacgccacattggtagccggatacaataagtggaaagaccagtttgagcgtcatgtaaaaaagggcgagcatggcattaccatcatcgctcccacaccgtacaagaagaaaatcgaggagcagaagctggacccggataccaaggctccgattctggataaagacggaaagatcgtcacagaggaaaaagaaatcgagattcccatgtttcgccctgtcaaggtctttgatgtgagtcagaccgacgggaaacctttgccggagcttgcttcctccctttccggcaatgtgccaaattatgaggcattcatggaggccctgcgccgcagcgcaccggtgccgattacttttgaagcaatggccgtcgatacggacggctatttttctgccgatcatcagaaaattgccattcgtcagggcatgagcgaggtgcagacggtttcggccacggttcacgagattgctcacagcaagctccacaatcagaaaaagatccagattgccaatgacgagcaatatcaggagatcgagctgtttgataaacttggtctgttctccaacggacggattgctcgcgatattctgccagagggcgtttattgctatgacctgcgcggttctgactacgatcctggagatccggtctgtgtggaagaacgagtggttgtaaaccatgcaggctccgttctgctgacagagccgttggaactgacggaagatggacgcttgatgctgaccgaggaaaaagggctgaattttaccggtggcttttctaccctctcccagtttttgcagaaacagaggaaagatcgtcacacggaggaagtggaggctgaaagcatctcctatgcagtctgcaagtattttggcatcgagaccggagaaaacagcttcggctatattgcaagctggagccagggcaaagagctgaaagagctgagagccagtttggagaccatcaacaaaacctccggcactttgatctccgacattgagcgccactataaggaaatctgcaaagagcgcggaatcgaccctcatgcaaaggtagagccggaacccgccccgatagagcagccagaagatgccgctaaggtatctgatagacagcagaccggcgatctgacctactatgtagcagagtgcatggaatttccaaacctcggagaataccacgataacctgtctttggaggaagcaatccgcatttatcaggagattccggcagaacgaatgaacgggatcaagggcattggttttgagctgaaagacggaagcgactatgaaggaccttttccgattttgaccggccagaccattgacctggacaccatccaggcaatcgactattaccgtgataatcctctggtgcaaaaagcggtaaaggaactggctgcggcaatgccagaaatggaagtgctgggggcggacgccaaccagcaggaggctttgtttctgattgacgatgccacctatcttcatatccagtcctgtgacagcggctgggactataccctttacgatgccgcgtccatgaaagagctggatggtggtcagctggatatgccggagatttcccgcatgaaggcagttctccagatttgtgatgacaacgatttgggcagagactcggtaaaatacgcaccgttgtccatgattgagaccttgcaggaagctgcctaccagcagatgcaggcagaggtcagtcagatggctgcttcttcccagctgccggaagcacaggagcaggcactggatgaataccccatgccggatgagcaggtctccacaccagatatgcaggaatacggctactcctatgatgggatgctccctgttaccagagaacgggcgctggaactggatgccgccggtttgaccgtctatgtgctgcatgaggacaatacggagagcatggtgtttgacccgcaggaaatcatggatcatggcggtctttttggcgtggaccgtgaggaatgggagaaaagccctcagttccacgaaaaggtcatggagcgtcaggatcatcagcaggaacgcgaacaagcatttctcgctcagaacagagattgctttgccatctatcaggtaagtcgtgacgatccgcagaatgtgcgctttatgaatctggactggctaaagtcccatgatatttccatagagcgcagcaattatgatctcatttacactgctccgctgagggagtctggcacggtaccggagcagctggaaaaactatatgagcagtttaatctgcaaaaaccggcggattttcacagcccttctatgagtgtcagtgacatcgttgcgatcaagcaggatggtaaggtatcctatcattactgtgacagtgttggctttacccagatccccggattcctgccggaaaatccgctgaaaaatgcggagatggccgtggaggacgattacggcatgatcgacggtatcatcaataatggcgtaaaggaacctacggtagcagagctggaacagcaggcccgcagcggtcagcccatttccctcatggatctggctgccgctgcccatcgggaggaacgggaaaagaaaaagtccgtcatggagcagctgaaaagccagcccaaggcagaacacaaaaagatagcgccaaaaaagagtgcggaaagggagatttgatatgggaaactttacttttgaggaaatgaacctgatgtgcatttacaataccggcagccgcaccggactgatcgacagcctgcgtgagatgcgcggcgagctttcgccagaggaaacggaactgagggagctgaccgacagcgccctttgcaagctccaaaccatgacggatgatgaatttgcggaattggaattgtacccggattttgaccagtaaacaccataatcgcagggatggggtggcaatatgccaccccacctctttacccaaaaaccgaaaggaggacagaatactatgccaaccaaagctgaactatatgcacagatggcggagaaggtgacaacgcagctcacggggagctggcaggaatgggcagggttccttactacggcagcccgactttacaagtacccgttccatgagcagctgatgatctatgcccagcgaccggacgccaccgcctgtgcggagtacgatttgtggaatgaaaagatgggccggtatgtaaggcgcggttccaaagggattgctctggtggacgattccggggacagacctcgcctgcgttatgtctttgacatttccgacaccggaacccgtgaacattcccacactccctggctgtggcagctggaggagcgccatctggattccgtgcaggtcatgctggagcgcacctatgatgtttccggtgatgaccttgccggacaactcactaaggtagccggaaaactggctgaggaatactggacggagcatcagcaggacttcttctatatcgttgacggttcctttttggaggaatatgatgagtttaacatcggagtacagttcaaggcagcagccaccgtcagtatcacttatgctttgatgtcccgctgtggactggaaccggaacgctacttcgaccacgaagatttcatggcgatctttgatttcaatactccggcaaccatcggagcgctgggaacagcggtcagccagatcaaccagcaggtgctgcggcagatcggcgttaccgtccgaaatgcagagcgcgaagccaaccaagaaaggagcaaacaagatgaacaatcccatgacctatatccagaacggagactatctgattcccgacctgaagctgagccagcagccggagaaacccctgggcaagtacggcaggatgaggaaaacctacctgaaggaacatcgtcccatcctctacaaccagatgttgctgagcgagaagctgtacccgcatcttctggagatcgacgagaccgcccagagcagactggagcagatgatgcccaagctggcgaaggaagcgggagccaccgaggaactgaaagccagcgatcccatgaagtgggtggggctgatgaacacctgcaaagctcaggccgaggaaatcctgatggcggagcttatcaacagctgactctaaacctgttcctctccgaagcggaacagatccaatccatagatgaagcagagaatgtagcgcatacatcctctgctttttcttttgcccaaaatgacatcgaccatgtgctgcgtttgggcggcaatacagaccgtcaaagggagcgtgtggttgcagcctttgaaaagcagaaaaccaccgctgagattgccgagatactgaaaacgctgtaccacggcggcaatggccttggcagtgtgagcgcatggtatgccgaggatggtatccatctttcccatgggaagtctgtccgttatgacaggtctgcccaggtcatttcctgggagagcgccgcagagcgtatcggggagcttttggagagcggccagtttgcctccaatgtggagcttgcagaagcggcaggctatgaacgctccctcctttcagaaaagctctggtatctgtaccacgatttcagcgaggaagccagagaagccggatatttgtcctgcctgtcagagatcaaaggcaatggtttcccggaggagacccgccgcctgacggagcagctgagtgaaccggctttccgccagaccctcaaggaagaatacgctgccttcttgactgcctatcagcaggaccgtgacctgttgcgctttcactaccataggccaagggaaatctgggagaacctgaaggatcttgacctgccccgcaggaccttttcttcagagctttcccaagtgccaaccgtccagcactttattaccgaggatgagatcgacgccgccatgaccggcggaagcagtttcgccggaggaaaaggccgtatctatgcgttcttcatggcaaaccatacggataaggagaaagtgagatttctcaaagacgagtatggcattggcggacgctctcatgccttgtccggcgcaacacacagcggcgaagatcacgatgggaaaggactgcactataaaaagcaggactgctcggatgttcacttgaactgggaaaaggttgccaagcgcattacctctcttgttcagaaaggccgctatcttaccgaacaggaacaggcgcagtataacaaaatccagtctgaacaggaacaggccgaagaagatgccattcaagcccagcagccggagatggatgaagaaacgccaaagcctacccttggggagcagtttgagcagtataagcctgtggtgactgccgccatttctgagaataccgcataccgcaatgcctgcggtcattctgaccgtgaaaatgctgtcatcgagggtaatgccgctgtgcgccgtgcggtccttggttctaaggatatggagctgatccgactctattcggatgtgccggagttccgccagcgtctgcaccgggaagtgatcgacgaaacctatccaaagctccatgaacttctgcgccctctttctcaggaagatattgatactgccctttgtgcatggaacggcaatatcgagagtaaacacgctgttatccgctatatgaaagaccatgcaagagaaaaagataccgccgcatggctggctcaggaatacggcggcagtaacagcaacagcctgttcgttgtccgtgccggcagcccggaggaaacgcagctgccctggccgaaggtacagcgcaggcttgcccagctcattcaggaggaccggttctataccgaagaagaacagaaccgttttgacgacatcgacccaatcgccatccgggaagctctggaagaaagaggaatcgtcaacggacaggtgacagacccggaaaaactggacaatgccccgtttatccaacaggtgatgtcagatgcagagcagatcgcagatgcagagcagatcgcagatgccgagacagagcagacttccgaagtttccatttccgatgaggaatatgacgcagttcgccgcccagttccgcaaagaacctcctatgacccagccgccacggtctatgccgtgggcgataccgtgtatatcgaggatgacgcctatcagatcacagagctgcgggaggacaccgtacagcttctgcccaccgggatggtatatcccatctaccgggcagagcgcaaagaacagttcgagcagctgcttcgggcagaccgccgcaatgcttactataccgagtttcttcctactgacccggacaaggcagatcaggacttgcgggatgtattggctcatggactgatggatgaagcggataaaaagcagatttccacgctgctgcaatccggcaggagcaacagcgagatcgcctactggctgagcagagcctattccggtgagatcgagacactgaatctggagaccggcgatattgccgattaccgtaccacggcacagggcatagagctggaagtcatggatgcagaggaaaagcgtctggctatgctgtatttccgctgggatgaggttgcacctttgctgcgcgggatgtacgcccgtcagcaggacggtttgggacaggaacagccccaaccggctaccgaatccccgaccttccattccgagaccatggccgtctatccgggcgataagaacaatctgccttatgatgtggtggtggaacgactgcatatcgaggagccggagccaccagcgcctgtgacagagccggagaaaacctttgaggaagtgctggacgaacacccggtttccattcaggtcaatggccagtggcagaccttccccaatgccaaagctgccgaggaagccgcttacggggaatacaaggacaacctgcgccgcaccgctgagaatttccgtatcaccgacgaccacctgggcgaaggcggtccgaaagccaagtttcaggccaatatcgcggcaatcaagctgctgaaatatctggaagaaaccactgaacaggcaacgccggaacaacaggaaatcctatcccggtatgtgggctggggcggccttgccgatgcctttgaccccgacaaggaaagctggagcaaagaatatgcccagctgaaggagctgctgaccccggaggaatacgtagctgccagaggttccaccctcaacgcgcactacaccagcccaacggtcatcaaagcgatttacgaggccgtgggtcgcatgggatttgagaccggcaacatcctggagccgtcttgtggtgtaggcaatttcttcggtatgctgccggagagtatggccggaagcaagctgtacggcgtggagctggattccatcagcgggcggatagcccagcagctctatcccaaggctgacattaccgtggccggatttgagaccaccgacagacgggacttttatgaccttgccatcggcaatgtgccgttcggccagtatcaggtccgggacaaagcctatgacaagctgaatttcaacattcacaactactttttcgccaaggcgctggatcaggtgcgtcccggtggtgtggtggcctttgtcaccagccgctacacgatggatgccaaggactccaccgtgcgccggtatctttcccaacgcgccgagctgctgggagcgatccgtctgccgaatgacgcgttcaaaaagaatgccggtgccgaggtggtatcggacatcatcttcctccaaaaacgggaccgcccgatggacatcgtgccggaatggactcaaaccggacagacggaggacggatttgccatcaaccggtattttatcgaccacccggaaatggtgctgggcagacaggagccggtaagcactgctcatggtatggactacaccgtgaaccccatcgagggactggagctttccgaccagctgcatgatgctgtgaagtacattcatgggacttatcaggaggcagagctgccggagctgggcgagggcgaagccattgacacctccattcctgccgaccccaatgtgaagaactattcctatgccattgtagacgggcaggtgtactaccgggaaaacagccgtatggtgcgccctgacctcaacgccaccgccgaagcccgtgtaaaaggtcttgtggaactgcgtgattgtgtgcaggaactgattgaccttcagatggatgcagcggttccagacagcaccattacccaaaagcaggcggaactgaacagcctctatgacagcttttctgccaaatacggtctcatcaatgaccgtgcaaaccgtctggcctatgcagacgattcttcctattacctgctctgtgcgctggaagtcatcgacgaggacggaaagctggaacgcaaggcagatatgttcaccaagcggaccatcaagccccatcaggcggtggctgccgtagacacggcaagtgaagcactggcggtgtccatctcggaaaaagcctgcgtggatatggactatatgagccagcttaccggaaaaacaaaagaagaactggccggagagctgcaaggcgtgatcttccgtgtaccgggacagctggagaaagacggcacaccccattatgtgactgctgatgaatacctctccggcaatgtacgccgcaaactgcgtcaggcgcaacgggcggcacagcaggacccggtttatgcagtcaatgtggaagctcttagcgccgcccagcccaaagacctggatgcgtcggaaatcgaggtgcgtctgggcgctacctggatcgacaaagagtacatgcagcagtttatgtacgaaaccttcaacaccccgttttatctccagcgcagtatcgaggtcaactattcgtcctttaccgctgaatggcagatcaaggggaaatcttccgtatcctacaacgatgtggcagcctacaccacctacggaaccagccgtgccaatgcctacaagattttggaggacagcctgaacctgcgggatgtccgtatctacgacaccatagaggacgcagacggaaaagagcgccgggttctgaatgccaaggagaccaccctggcagctcaaaaacagcaggcgatccgggaagcctttagggactggatctggagagacccggagcgccgccagactttggtgcgccagtacaacgaggaaatgaactctacccgtccccgtgaatatgatggcagccacatcacttttggagggatgaacccggccattaccctgcgggaacaccagaaaagcgccattgcccatgtgctgtatggaggaaataccctgttggcacatgaagtaggcgcaggcaaaacttttgagatggtggccgctgctatggaagccaaacgcctgggcttgtgccagaaatctctttttgtggttccaaaccacctgaccgagcagtgggcgtcggagtttctgcgtctctatccttccgccaatatcttagtcaccaccaaaaaggactttgagacccataaccgaaagaagttctgcgctcgtattgcgacgggtgattatgatgccatcatcatgggacacagccagtttgagcgtatccccatcagccgggagcgtcaggaacggcttctctatgagcagatcgacgagatcaccgaagggattgcagaggtacaggccagcggcggcgagcgttttaccgtcaagcagctggagcgtaccagaaagtctctggaagccagactggaaaagctgcaagccgaagggcgaaaagacgatgtggtaaccttcgagcagctgggtgtggaccgtttgtttgtggatgaggcccacaactataaaaacctgtttctatacacaaaaatgcggaatgtggctggtctttccacatcggatgcacagaaatcctccgatatgtttgccaagtgccgctatatggatgagatcaccggaaatcgtggcgtgatttttgccaccggcacaccggtcagcaactccatgaccgagctttacaccatgcagcgttaccttcaatatgaacgcctgcaagaactgaacatgacccacttcgactgctgggcttcccgattcggggagaccgtcacagcattggagctggcaccggagggaaccggctaccgggcaagaacgagattcagcaagttctttaacctgccagagctgatgaacctgttcaaagaagtggcggacatcaagaccgccgaccaactgaacctgcccaccccggaggtggaataccacaacatcgtggcgcagcccaccgaacatcagcaggaaatggtcaaggccctttcggagcgcgcatcgctggtacacagcggaaccgttgacccatcccaggacaatatgctcaagattacctcggatggccgtaagctgggcctggaccagagaatcgtcaaccagatgctgccggatgaacctggcacaaaggtcaatcagtgcgtggacaacatcatgcagatctggcgggatggcaaagctgacaagctgacccagctggtgttctgcgacatttctacaccgcaggcaaaagctcctgcaagcaaggcggcgaaaacgctggataatccgctgcttcacgcattggaaggcgctgtgcctctgccggagcaggaaccggtctttacggtatatgacgatattcgtcagaaactcattgctcagggaatgcctgccgaccagatcgcttttatccatgaagccaacaccgaagtgcggaaaaaggagttgttctctaaagtccgtaccggccaggtgcgtgtccttttgggcagcaccgccaagatgggcgcaggcaccaatgtgcaggaccgtctggtggcacttcatgacctggactgtccgtggagaccgggagaccttgcccagcgcaagggccgtatcgagcgccagggtaaccagaatcctcttgtccatgtgtaccgctatgtgaccgaaggaacctttgacgcatacctctggcagacggtggagaataagcaaaaattcatcagtcagatcatgacttctaaatcaccagtgcgttcctgcgatgatgtggacgaaacggcgctttcctttgccgagatcaaagccctgtgcgccggagatccccgcatcaaggagcgtatggatttggatgtggaggtatcccgcctgaagctgatgaaagccgaccaccagagcaagcaatatcgtctggaggaccagctgctcaaatacttcccggaggagattgaaaagcacaaaggctttatcaagggctttgaatccgatctggaggttttggcagcgcacccgcacccggaggacggttttgctggtatggagattcgtggagacctgctgaccgataaggagaacgctggtgcagctcttttggatgcctgcaaggaggtcaaaacctccgatccggtgcagattggcagctaccggggttgtgccatgtccgtggaattttccgcttggaaacaggagtatacgctcctgctgagaggacagatgacccaccgggcaacccttggtacagaccctcgcggaaatcttactcgtatcgacaatgcccttgctcagatgtcccagcgtctggaggcggcaaaggcccagctggataacctttatcagcagcaggctgccgcaaaggaggaagtcggaaagccattcctttatgaagaagaattgagaagcaaaaacgcccgtctggtggagttggataccctgctcaacatcgacggaaaggggcaggcacacaccgagtctgttgttgccaaaagcacacggccttcggtgctggataacctaaaacgcccggtgcaaccccacagtacagacaagaaaccaaaacagcatgaggaggtgcgataacatgaatactaacgatctgaatgcagccctttatgaaaagatggctgccgaacaggataagttccggaactggctgaaaagccagcccccggaagaaatcctgcaccacacctatgaatatactgtccgtgaggatattgtgatggcgctggaggagctggagctgaccgacgtccaggccaaggcacttttggaatatccctctccattggcggatgtgtaccgctattttgaaaagctggagaccggctatatggatgtgatccgggacagtattgagaaccgtgccgacgatgtgtgcagagctaaagaggaactgcgaacaacaccgatctatccccattcagctgcctatgcgagagaacatggggagctggagcagtaccgagcttccaacaatgtaaatcgccaatgcaaggagtctattgaagcggcggtgcgggagcacttcgacggaatgtatctcagccacgatgcggcaaagggtgtgatcgagacctatggcatggagcgtgtgtccatggttctgtctaacacggtccagcttcaggactgggatgggcgttactcccgacgcaacaaagaatgggccaagaccattcccaacgataatcccgaaaccgtccgttgtggttatgccttaaacagccaccctgctgtgctggatggttttattgatctggtgcgtgaggaacagcagcgcagccgtacccagagagaaaaactggaaccgtcccgtccctcagtacgggataagctcaaacaggagctgcccgcccataagtctgccgccccgaaaaaacgggagccggagcgataaccatggcaaagcgcaagcgggatgtgccggttttgttttgggtgtccgcagaagaactggaactgatccatcaaaagatgcagcaatacgggacagagaatttgagcgcttatctgcggaaaatggcgctggatggttatgtggtcaagctggaactgccagagatgaaggagttggtctccctgatgcgccgaagcagcaacaacttgaaccagctgacccgcaaagtgcatgagaccgggcgggtttataatgctgacttggaggatatatcccagcggcaggaacaactgtgggagggtgtgaaggaaatccttacccaactctccaaactttcataacagggatagatactccatttgcggagggaggaacggcgtttcttcgccgcaccttcctccgctttttctttttgtctgtatccttgtcttttgcctgtccgtaccggataatatgagtagaataagaagcgtagcaaaggagtgaaaacagatgctgacctttgaaaaggtgctggagatttttgcggattacctaaccgcagacgagaccatagaagtttatatcagccgccatggatgtgtaagagttgaatttgaccaagattttcactattgctctggcgaggtgtgccatactcccaaggaactgttcgacctcttagccgatgattaccggacttatctggagattgaactgaccaaaggaaaacgggaagtgacggaagatgatgagagagaagcggatgccctatgcaaacagtatctggagcgttggaaggaggaacagaaatgaagattttgaaatgtctgctgatgatcgtaactgcaccggtcattttggtgttgacgctttttgtctggctctgcacggggctgatctacatatccggtctggtgcttggtctactaagcacggtaattgctctgcttggcgtggctgtgctgattacctattccccgcagaatggtgtgattttgctggttatggcatttttgattagcccgatggggctgccgctggctgcgatctggctgctgggaaaggtgcagagtttgaaatttgcgatacaggattgggtgtatgggtaaatgatgtgaatataatttggaatgaaaaagaagcaggacaatgggagatgagacccaatgccctgcttctctgtttatttggaacgaactgtaatatatttttgattgcgacttttaggtttatcgggaatagtcatttctaattgcccggattctaaaagcggattgatatgtttcaaagtgaagtttcttaaatctttgaagccgcaaaatactgcaagctctttcttggattttggtgttgtgcaaaaagccaaaatctgtttggataccgttgatagttcaataacttggtgggtaacttggtggataacttggtgggtgtcatcctctaagttgtagtttacatttttcaagatgaccctgaaatctgttgctgttgaggaaaattcaggcttatatgccgctgtatatccaggtagtttttcggtttcactgacgattttgcgcagaccacttccacggcgttccatgtacttcatgcggtggaacaggtcagcaatcacagggtttcgccgcatcgaacgaatactgtaaatatcgtattcttgaattgagccgccgccaaacataccgcccggagatgtgatttccacccgatcatcaaacatatcaatgtggacttcgctgccaagcacaatataatcacgatggatgagagcgttgacaagagcctctgttacagctcgttcagcataatccggcttgtctacccgatactgagcttctttgacaaaacggactttggaattattgcgaataaattcactgccgcttttcagtaaataaatcaaattcccctcgtattccttatcgtccagcgcatcatcaaagatagagcctttttccaagccattccaccgggtacagaacatacgggagttataaactgtgtgctgatcggtcatgagctttccggcattggtcaaaaacccatttttgtcagccaaaccgaaggagacataatcggatggctcaaagcggagaccagtccgttccagataggttgcttccagaagtgtaaagctgtaatccttttttaccgcgtctgttgttagggtatcaaaggactgattggttccctttaagatcagttcattcacaatgtaatcaggggcaattacgctttcatttccaacacggatatatgcttccatcactccgtctgccttgtaatagtatggggtgctgcggccaggagaaacctccagagccaacaggtttttaccatcttcctgcaatggctttaagataaactgcggtaatggtgtgatacgttctttgattaagcggctgatcgcttcagcatccttttgaacatcggacaagccgataggctcccggtcatcggagactccgaaaaacagagtgccgccaattccattggaaaaggcactgacactttttaaccagctttttggcttttttatttcgagagcaactttgaaatcacattcggttgcttcagcaatgagctgttctatcataaaatccctcctttgaggtattggtagtttctttatattatacccataaggagagtttatttcaacgataggcacaaagagttcagagaaaatattttgagaggagggctttttatggcaactacaagaatcatgccacttcatgtcggcaaaggccgcacagagagtcgggcgatcagtgacatcatcgactatgtagcaaatccacagaaaacagataatggcaggctcatcgcaggatttgcgtgtgacagcagaacggttgatgcggagtttcttttagcaaaaaggcagtatatcgttgctaccggacgagtgcgtggtacagatgatgtgattgcctatcatgtgcgccagtccttccgccccggtgagattaccccggaagaagccaaccgtctgggcgtagaatttgcaaggcgttttactaaaggcaatcatgcctttgtggtctgcactcacatagacaagtcgcacattcataatcacattatctggtcatcggtcagcttagaatatgaccggaagttccgcaatttttggggcagcaccaaggcggttcgtcggctgagtgacaccatctgtattgagaatgaactgtccattgtagagaatccgaaacctcacggaaagagctataacaaatggctgggcgatcaggcaaagccctctcaccgagagctgcttcgtgtggcgattgacaacgcattatcacaaagtcctgctgactttgaagaactgctgaagctgttgcaagagtatggttgcgaagtctcaaagcgcggaaaatcgtatcgactgaagctctctggttgggagaaagccgcccgcatggacagtctgggcgaaggatatggattggaagatttgcgggcagttctcttagggaagaaagcacataccccgcgaaagaaaacagtcacacaggcagagccgccgaaggtcaatctgctggtggacattcaggcaaaattgcaggctggaaaaggtgctggctatgctcgatgggctaaagtttttaatctgaaacaaatggcgcagaccatgaattacctgtcagagaacaatctgctggagtatgcggttttggaaaaaaaggctgtggctgccacggcacatcacaatgaactttcggcgcagatcaaagcggctgaaaagcgcatggcagagattgctgttctgcgtactcacatcgtaaattatgccaagacccgtgaggtctatgtggcataccgcaaggcgggttactctaagaaattccgggaggaacatgaggaagaaattctgctccaccaggctgctaagaatgcctttgatgagatgggagtcaagaagcttcccaaggtcaaagagttgcagacggagtacgcgaaattgctggaagaaaagaaaaagacctatgccgagtaccggcgttcccgtgaggaaatgcgggagcttttaacggcaaaggcaaatgtagatcgagtgctgaaaatggaggtagaacaggatgttgaaaaagaaaaagaccacggccagcggtaagctggtcctggtcaaaagcgttcgcagaacgcgcagccacagaatgaaattctgtgttcaaaggggcttgggggcgctgccctcaacaagcaagcggagaggaaaatcacaaagggattttcttctctgcgggtcggtgtgtattaacaccggcattgcttgcctcttttctccgaaaatgaaaagaaccagtgagagaatcgttaaatttcactcactggctcaattcatttcaaatttctcggacaattctgttagctctttcaccgtttcctgtgtgtgatgcaacagggtgtcgcgcatttctggcggacagctggaataaagcattttcatctgattgacaccctcatcctccagagaaatatctggatttataagcgtatctaaagagatgtgcaggacctttgccaatgctctcaaaatcaaataggacgggttcattttccctttttcgatattggcaatttgctttacagaaacatggctcagatcggaaagttcctgttgtgtcagttctttattctttctggcctctctcattttctgccctaaagcagttaaatcatcaatcggcataatcgttcacctcaaatatattttatcgttccgatttgcacaaaggaataaccttattgtgcttgagaacaggactgattatgctgattcctttttgataacatggttgctccatgattatggcgtttccggctgctaattgaactatgaggatgaattgcagatttcagcttttagttcgttgccaaacgagaatgatatagaatgcggtagggaggctatcagttttatccgctcatctatgagccgttttttattctctgtgacataaaattcatctggatattccgttttcggttcgccatgcgctgcctccattcttcataagagtttgagattatcccaacaaacatttttcattttcgggcaagggacctgaaaatccgaaaaatcgcaagcgggtactcgcttgctgtgcttgctatcgaaaccctaccttctatttctccctctactaatactacaatttgaagcggtgattttggctgtttccatttcaaattatgcaagaaccgcctctgttcaatgttgaatagttctatgttcacgcacacacgcaggcaatcactccccgtaaagataacaaaagcaaagtaattgtctatttggagcgaaaatgcctttttggagaagaaacatacagacatatctgctatactgaaatgcggttagttcgtgctaacacaaaagcaaacaggaggaccaaataatgaataaactacaaggaaaagaccttatcaatgttggaatcttcactgcgatctattttgtggtgatgatggcgattgccatgctgggatttatccctatttttcttccgcttctgatcgtgctggttccgctgattggcggaatcgtaatgatgctgtattattctaaagtccagaagtttggaatggtatcgctgacaggactgatctgcggtattttaatgttgctgaccggcatggggtattggagcattattaccggtgccgtgttcggtgtcctggctgatcttgttttgaaatccggcgattataagagtgcaaaaaaaggaatcatatcgcatggtgttttttccatgtggatcatcggaaactacattcccattgttgcaacacgggacagctactatcagcagctaatcagcggttatggacaagagtatgcagattccattatgagctatatctcggcatatacgctcccccttcttttgattgccggattcgtttgcggcgtgatcggcggtgtgatcggccagaaaattttcaaaaagcactttaagcgtgcgggtattgcataatgcgccgtgaattgttagcaagcaaaaaaaaggaaaccggcctgtcgttagaccctcggacaaagttggcattgcttatcacgattgccctctttgtcttgagcggcggaggtggggctgcttctaaacagtttgctcctattttggctgctgttccattgatcctgctgctcacggaaaaatcgtggaagggatcggttatctattttgttttatatggcggcagctatatattgcaactatgggcgctcccccacctgtccggccttcctaactttcttgttgttgcaatctgcggtttctttatgcggtttgtgccggggattatgatgggatacatcacggtcaggacgacgacggtcagcgagtttgttgccgccatgaagaagctgcatttaccggagcagatcatcattcctatgtccgtgatattccgatttttccctactgttgtagaagaatataatgccataggggacgctatgaaaatgagaggaatccgttttggcgggggcaaagccagtgcaatgctggaatacaggcttgtccctgttatcatgtgttccgtcaagatcggggaagaattaaatgcggcagccctgacaagaggattgggcggtccggtcaagaggacaaacatctgcgaaatcggctttcatgtgcaggatgtttttttcctgctgctatgtgtggtggcttttgcaattcctattgtcacgatgattacagggaggtaggcctatgatcgaatgtaaaaaagtttctttttcctaccctccaaatgaaactgacattggggacaggaaaggacacggaacattaagaaatattgacctgtctattaacgacggggattttgtactgctctgcggaacatcgggctgcggtaaaaccacactgacacggctgtttaacggactgattcctcattattacgatggaaagctggaaggcactgtcatgcttgatggagaagatatgagcgggctttccctgtttgatatatcaaaaaaagtgggttctgtttttcagaatccacgttctcaattttttaatgtggatacgaccagcgaaattgcctttggatgtgaaaaccatggattggaagaagcagaaatccgaaagcgggtaaagctggtctcagagcagttgaaccttacaaatctgctggacagaagtgttttctccctttccggtggggaaaagcaaaaaatcgcctgtggatctgccgccgctgtggaaccggatgtatttgttttggacgagccatcttccaaccttgacgcctattccatcgctgattttcggaaactgttaaaaatattgaagtcacagggcaaaacaattattattgcggagcaccggctctactatctttatgatctggcagacaggatcatatatttaagcgacggggaaatacaaggggattatactttgccggaatttcagttgattccggcggcggaaaaagctaaaatgggattacggcctcttggcctgggtgagtttgcagacattgagcctgccagtctacattcagggcaggggatatggaaactgaaccacttccatttcgcatacaagaaacagccggaaacgctttctctggaaaatatagagcttcctgccggaaatgtaacggcggtcatcgggcacaatggagccggaaaaacgacactatctcgttgcttatgcggattggaaaaaagatgtaaaggtatcctcgaaaaagatggtacttcctattcaagcaaacagcggctgaagctatgctatatggtcatgcaggatgtaaatcatcagctttttacggagagcgttttagaggaagtcctgttaagtatgccggggaaagattccgatgaatcgcctgaaaatgtggcaaaggcagaggctatcttgacagaaatggatttgctcccgtacaaagcctgccatccgatggggctttcgggagggcaaaaacaacgtgtggcgattgcttctgcgattgcctctgaacgtccggttatactatttgacgaacctaccagcggccttgatctctttcatatgaggcaggtggccgattcggtcaaaggacttgccgattcaggaaaaaccattgtgattgtgacccatgatcctgaatttatactcaggtgctgcaattatgtgatccatctggaaaacggcagattggaggaaagctatttcctccaggatacggaaggacgggaacggttatttaatttctttatgatggaaggaggcggcggaaatcaaactgtttgatggtaaaataaactgcggctcaaatgttaaaaatgtcattgaaactgaggattgcgttgtcctgcagctttttgacgagagcggcgagggaaccatgacagcccacaaaatttttgatggcgcttttgtgatgtatagcgatatgcacctgaaagaatgtacctcctactttcagagtagtacggacagttcgcttctctatatagaccattgcagggagggacggatcgaaagcgagattgacaatcatgcgtatagctatttgcaagagaatgagatgcgtgtggatgaccggcgttcccattcgggacggttctgctttccactctgccactatcatgggatgaccctgggatttgatctggacattgctgtgccggcgctgaaagacttttttggcggattttctgttgatttgtacgagcttcaaaaaaagtattgcaatgacaagaaaccgtttgtgattcataatgagccaggaattgaacatattttttcagagctttactttgtcccgcagcagatcaaaagtgactactataaagtaaaagccctggagctgcttttatatctggacgctttgcagttttctgattccaaagaagatcgcccttatttctataaaggtcaggtagaaaaaatcaaagcgatccatgatcttattacggcaaatttgcaggagcattacacgatggatgaattagctgaacgattccagatttcgttgacggggatgaaaacctgctttaaggaaatatacggagattccatgtattcctatcttcgccgttatcggatgaacgttgctgccacaatgctccggcaggattccaaaaaagggattgcggaaattgccggagctgtgggatatgaaagccccagtaaatttgcaacagctttccggcaggtgatagggcagacgccgatggaatatcgaaaatcttttttctaaacggtgcataaatgccgttttggagaggaaagaagaattgaatactgctacaataaggatggttagcaaagactacccatccttttttctttgctgactaaaaagaaggaaggtgattgtaatgaagcagcaaaaagataattgggtgaaaattctgttttccttcgccgcaccatgcaaggggaaaatggctctttcggtattctgcgccattctgagcgttgcaggagggtttattcctttttgggctgtatatgaaatcctgctggcatttatcaatcagaatgtgaccctgaatggcattctgatttggtgtctggttggagcagcgggctacctgctgcgggttgcctgccatggaatctctacgatcctggcgcatatttcagcctataccattttggaaggaatccggcttaaaattgcggaccggctgatgaaagcgcctctcggcgaagtgatggggcggcgaatcggctatctgaaaaatatcatcatggataaggtggaggatttagagccgcctttggcacacatgatcccggaattgacttctaacctcctactccctgttgcaatttttacctggatgatggtcattgactggcgcatgggattggcggttctgattgctccggtgctggccatgattcctatgtttttccttatgaggaactataacagccagtacgccgcttatatggaggcaaataaccacgtcaacagtattattatcgagtatgtggaaggtatcgaggttgtaaaggcctttaaccaaagcacaagctcctatgaaaaatttgttaatgctgtccagtcgttcaaagagtttaccttggcgtggtttaagagtacatggaaatcgatgaaccttatgatggcgattatgcccacaacgctcctgggggttcttcctgtcggccttttgctggtgcagaatggaagtatctcccctgcggagcttgcaatggggattatcctttccctcagcattgttggaccgttgatgaaagcaaccactttcattaacgaagcaaagtctatggaatatgcagtagaggcggcaaatgaacttttgaacctgcctgtactgccggattcagggaaaatcgtatctattcctcacaatgatattgcgttgaagcatgtaaccttttcctatgacggttccgagcaaaatgaagtgttgcatgatgtgaacctggaattgccagagggaagttttacggcacttgtaggaccgtctggcggcggtaaatcaacgattgcccgtctgattgcaaggttttgggacgtgacaggcggcaacattaccattggggggaagaatatcaaagagttgtctatacgccagctttccgaactggtcagttttgtgacgcaggataacttcctgtttaattgctccctgaaagaaaacatccgtcttggaaatccaaacgccacagatgaagaagtatatgcggcggcgaaagcggcctgctgtgatgaatttattgtgcgtttggacaaaggatatgatacccctgccggtgatgccggaaagaggctgtccggcggcgaaaaacagcgaattgcgattgcgagggcgatcctaaaaaatgccccgattgttattttggatgaagcgacagcatttactgacccgcagaacgaagataaaattcagaaatctatcatggcgttatcaaagggtaaaactcttcttgtgatcgcccaccgcctttccaccattcagaacgcagatcagattgtcgtgttgaaaaaaggccggattgtggattgcggaaagcaggaagaattgttgaagcggtgtccgctttatgcggatatgtggaaagcccacatcggggcgaagaattggtctgtgagtgaaaagaaggaggtggccgctcatgtttaagtctatgaaacggatcattaaatgggcggggaaatataagggacgcctctatcttggctctgttttttcctttttcagcagcctgtctacggcgatccctacaatggctgccgcttatgcccttgataaagcaatcgcagcttattgggcaggcaacacaatagaatcctccctgatctggcagacgctttggattattgttggctcgattgcgcttaactttctactctcttatttgcgggcggtgttgcaggaaagcattggctatgaagtagccgcagggcagcgaatccatttaggcgatgtgctgaaaagggttcctctgggatatttttctaaaaacagcgtgggcgatattctgacaggtgttaccacggagctatccacacttgaattgcagggaatgaagatggttgacatcatcatcaacggatatgcaaagtttattgcaattcttctgtgtttccttttcctgagtccagccgcagcagtgatttctgttgtcggcgttgccttttcctcattggccttacatggtatcagcaggcatagtgaaaagaccgctgctatcacgcaccaggccatggaggatatgtctggctctgcgattgaatatatccgcgggctgtccatcgttaaatcgttcggacaggaaggggcttctatcgaaagtttccgcaaggcaaatacggatttgaaaaatattcatatcaaagtagaaaaaggctatacgccatttaactgcttgcatctgttctccttaaaactggcatctatggggattgtgtttatctgtgcatggcagacacttaacgggcaaatgagtcttgcttatttcctgatgtttgttctgttttctttcgtaatctttggaagtgtggaaaacattaacgacgcggctcacatgctgggtcttatagattccgctatgaataagctggaagctctggaaaatgcagaatatatcgaccaagacggaaaagatattacaccgacctcgtatgacattacttttcaggatgtatcctttggttacgataaacggactgtattgcatgatgtgaatttcacgattccgcagaataccacaacagcgattgtaggtccctccgggagcggcaagtctaccctgtgtagcctgattgcacgcttttatgatgttgacgccggaaaaatcactttaggagaaacagatattcgagaatttacctgtgacagcttactaaaaaatatcagtatggtgttccagaatgtatatctgttccgggatacaatccgtaacaatatcaaattcggcagcccggacgcttcggaggaacagatgattgccgctgcaaaagaagcgcgctgccatgactttattatggccttgccagatggatatgataccgtcattggggagggcggttcttctctttccggcggtgaaaagcagcggatttcgattgccagagccatgctgaaagatgcgccgattgtcattttggacgaggccacggccagcattgacccagagaatgagcatttgattcaagaggctatttccgcactgacacatggtaaaacaatcataacgattgcccatagactggcgacgattgaaaatgcggatcaaattcttgtcattgatggtggaaccgtcgtgcagaaaggaacccataaggaattgctggctcaaaggggaacctatcaggaatttattaagattcgggaacaggctgagggctggaggattcaacaataagcataaaggaggaactgatgaagattcatgcgtctggggaggattatctggaggctatccttgttctacaaaagaaaatgggcatggtccgctccattgaccttgcccggcacatgggctttagcaaaccgagtatcagccatgcggtaggcgttttgaaaaatggaggttttctgaccgtggatgatgatgggttccttcatctgaccgtcataggtcgggagattgccgagaaaatctatgaacgccatttgttttttatggagcagtttatcgctgctggcgtcgatcaggaaacagcggaacaagacgcctgccggattgaacacgccatcagtgatacatctttccgaaagctgaaggagaaagtacaaggaaccgattagcgcacatcggctccgctctgcataataagttatctgccccgtccggggaaagaaaaaaaccgttgactggggcagataatttcgtgcgctattttaaggtttgaactcaatcggcggttttgaaggacaatttcagagccgccgtttctttgcgtttacacaaactaatgacgacttgcagggacacggtagccgcttggaggttaatttgccgtgtctcttttgctttttcaaagctcccatgatctacatcaattaaaaaaagcattgcccctcctccgggcaagtatagcattgcatcggcattatcgttccatgtgattcagcataataatgactgttcttggtgcgccagtttcccattgcgggaatctggcgttttttgttgcctttttttcggagataatccggctgtataccggtgtcgttccccacctccattcgattcactcgtcaatcacccgtgaatcgaaatggaggtacataatgaagaaaattaaccttcgggaactttatcctgatgtttatacaacagacttttttgtagatgtgacagaggaagtaatggagactattcgagcagctgaacgtgcggaggctgcgtatgagcgaaagatgtatcgttataaagcacagtattctctggattgcgagaatggcattgaaaatgcggtgctgttgaagccgaaaacaccggagatgcttctggaggaaaaacagcttcaggagcaggtctattctgctgtgatgaatttaccgaaaaaacaggcaaagaggatttatgcccgatattacctgggaatgacggtaaatgaaattgccggggtagaaggtgtagacccaagccgtgtccgagacagtatccggcgcggcttaaagcagctcggaaaatatttttgataaagtttcgtttgatgcgcctgttttttgccttttttgtcagtgttaataagaaggacaaattttcctccttcatctgcacattgacaatcgaatagacagcacaacaggtacataacccatgtacgagcgaatatgaaacgccgcgaggatggagcagtcagggaggtgatgaaagcactgcttcggagcgatctacgatttcataaaagaatggtggcagatttggcgcgatgactacatgggggcttaaagatacttcctcacggcccgccaaagacttggggggaaccctgcggcacacgatacgaacgatgctgcggagttatgacatccgcgccagcggagacctgttgtgttcccatcgtcagggggcgtggcaaatgtgacgaaagctgagaaatataaataggaagcgtttgccgctttctgttcaaaatcagataccatgcgctggtggtttcggctgccagcgtattcatgtgattttgaacaaacacgatgacaaacttgacggattggaggaaatatgctttatggaaaaacttattacgcgaaaagaagcagcagaaattttgggtatcagcattgcaacgctggacgcggcccgtaacaatggtcttatttcttatgtgcaatatgtgcagaatggctgtgtgtactttacctcagcgggccttcaggagtatatcgcaaaatgcacccacagagcaaagccagcagaaaagaacgcaacttatcgtaaacctcgcagagctggagtgtgagccggtccgtatccttgtcgaaatcataatggtctgataaaacatagatacagcgctggagtatattcttaggaggtggaggaattggcaaataggaaaataatgcttcctcaatatggcacagttatgaaaagaggtgtcctatattataggaccagaatcaaagacacgaatggtaagctcgtagctatctacgcaaaaacacctgaagaactatacaacaaagaaacgcttgcgttggaacagattgagaatgccacttttcatcggaaaacgcccacagttgcagagtattgtgaaaagtggctgctgatgcagtcggttcatgtacgagctactactttgacggattacacctcaaaggtcaggcggcatattatagcggaattgggagataaacggatgggtgaggttagcctggatgatattcagcttgcccttgttccggtttccaagaaatctgcatcggtttataaatctgtggtaatcctttacaaatctatctttcgcgcagcgatggaaagcaggatcattgaccataacccgacgatttatctcacgacaaaaggtggcggtgttccacaagaggatcgtcaggctttgacagatgaacaggcagcacgccttttggatgctatccgagatttgccgccttatgtctttgtcatgattggtttatatgcagggctgcgccgggaagaaattcttgctctgcaatgggattcagtatatctggatacggatactccatatctgacggtaaggcgggcatggcacacagaacacaacagaccggtaatctcagacgaattgaaaaccaaggctgcggagagaaatatccctcttcctgtttgcttggctgagtgtttgaaagcagcaaaggaaacatcgacttcggagtatgtggtttcaaaccgggacggcgaaccgctgtcctacacgcagtttaagcgactttggcagtatattgttacgaggacggtcaaggagcggagctattatcggtatgaagatggaaaaagagtaaagcatactgtcacacctgtcttgggggaaaaggctgctcataacggaaaagtggtttacagtctggactttgaagtaacaccccatcagctgcggcatacttacattaccaatctcattcatgcatcggtagatcccaaaacggttcaatacctggcaggccatgaaagcagcaagattaccatggacatttatgcaaaggttaagtacaacagaccagatgagctggtcagatcaatgagttgcgcgtttgcaagctgggacgcagcacagtaataataaaataggaagtaaagcaggagcgaggcaaggatgtctcgctctttgttttacatcagccgtatctttgattaaatcgaggctttctgataaaaagagagtgtagatacggagactacacattatcaagaaaggacgatcaaagatggcaaaaaagaaaacacagatcccgaagtatgggaccattacattgaaaggaatccagtattacagaaccaggattacggatgcagatggcaaagagttgagtttgtatgccgctacttgtgaagaattgtatgagaagcagttagaggcccggaagaaggtggaagaaattatctttcaccggcagcacccgacagtagctgagtatggagagaagtggctgctgatgcagtcggcaaaggtgtctgcgtctacactcagaggttatacgagggatatgacaaactatatcatcaaacctctgggagagatgtatatggaagaagtgactgctgacgatattcggctggctcttgttccattgtcaaagaaatcggaaggcttatacaataaggtcaatatgctgctcaagtgcattttttatgcggcagagagaaaccaaattcttgaacacaatccctgtgcgggaatatccggtaaaggcggaaaaccgacaaaaaagaaggaggcattgacagatcagcaggtagccgtgcttctggatacagtcaaggggcttcctccatatttgtttattatgctcggtttgtattccggtctgcgtcgggaagaaattcttgcactgcaatgggattgtgtgtttctagacgaggatacaccttatctatcggtgaggcgggcatggcgtacagagcataacagacccgtggtttctacggtgctaaagactccggcggcaaaaagggatattccgataccgaagtgtttggtggactgtctgagagaaacgaaagaaaattccatatcagattatgtgatcgctgacagcaaaggagagccactggctgcctcgcagttccaaagagtgtggcagtatgtcgttgtccgctccactaagccccggaactattataagtatgtaaatggggagagtatcaaatatacggttactccaacgctgggtatgacccagaagaatcaaccccaaatcaaatatacgctggactttgatgtgacacctcatcagctgcggcacacttacatcaccaatcttctctatgcgggcgttgatccaaagacagtacaataccttgccggacacgaaaacagcaaaacaactatggacatctatgcaaaagtgaagtataataaaccagaggagttgtttggggtagtaaatggtgcgtttcatcaggctatcgctgaatgaaaaaaggccgttttttatggtccgcacaccggataactgagaagcagaaagccggaaaagcccggaatatcaaggaaaaacagctcaaaaactcgcgcagtacggtctcaaagcagctcgtcgcgctccgcagttctccaagagataacaggcccgacaaaccaattcaaaaatgctcaaaaagcccggaaccatgcggttttccgggctttttcctttccaaaaagtctgttgtcctttgtccgattttggaaggatttgaccttgcctgacccggtttttcttgattaataatggggcaacaggccctttttgaccccgttatgattaaaaaatggggcaactgcgagccgaaatcggggtgttttagagggcattttccccgtcattttttcgattccatgacggcctttgtgaacggtttttcttttgaaggggatgtcctgatttgtcaggatttgaccaaaccgaatccagtttatcttgtccttctgagttgccgctgctgtgtttcaagtggatgaactctcgcacatttgcggcgcagtgttccttccatatatactgaaagcgtaaaggaggaacgccctatgaaaaaacggaaattcaagatatacctcacccccgccgaaaacagcattgtgatccagagccttaatcacctgcgcaatactatgctccgtgaaaaccgggacaccggctgcctggatgaacttctgctcaaagccatgtgcgccccggtgaagaagatgtaaaattacatatcgctgccagatgagccgcttattcttttcagaaagagtaagcggcttttttcatgtccatctttcggattttctcatacatagccgtccgtcttgccaacgggcggctaaatctaagaagaaggaggacatgaaaatgccggaacaaagaagccgccccagggatggccgcgtgatcgcgctggccaaccagaaaggcggcacaggcaaaaccaccacgacggtgaacctgggcattggtttagcccgtctggggaaaaaggtactgctcattgacgcagacccacagggcgacctcaccacctgcctaggctggcaagaccaagacagcctgcccaccaccctggccaccgttatggaaaaagtgatccgggatgagccattcaccacggatgagggcattttgcaccacagcgagggcgtagaccttatgcccgccaacattgagctgtccgcgctggaaatgagcctggtcaacgccatgagccgggagtttactttgcggacctatgtcaatgaagccaagaagcactatgacgtggttctcattgactgtatgccgtccctgggtatgattacgatcaacgccctggctgcggcggacagcgtgattatcccggtgcaggcccactatctccccgccaagggcatgacccagcttatgaaaaccatcaataaggtgaaacggcagatcaacccggctctgaaggtggacggggtgctgctcactctggtggatgggcgcacaaaccttgccagacagacagcagatacactgcggcagagttacgggagcgtgttgaaaatttatcgttccgagattcccgtagccatcaaagccgcagaaatcagcgccgcaggcaagagtatttacgcctacgacaaggggagcaaggtggcccaggcttatgcggatttttcaaaggaggtgctggcggatggcgaaaagcaacgggctaaacttcaatcttccctcagtcgatgacctgttttccacggaggaagagcgggctgaggcacggcttgaaaaagttgtcaatctttcgcccacggaaatcagcgacttcccgaaccacccgtttaaggtgcggatggacgcagctatgcaggaaatgacggaaagcgtgaagcagtacggcgtattggtccctgccctggtgcgccccaaaccggagggcggctatgaaatggtggccggacaccgcaggaaaaaggcggcggatttagcggggcttgcgaaaatcccctgtattgtgcggcagctcaccgatgatgaagccacgattatcatggtggactccaacttgcagcgggagcagattctgccctcggagaaggcgtttgcctacaaaatgaagctggacgcattaaaacgacagggtcagcggacggatttaacttcttctccactggataataagttaaaaggcgttacagcagcccagcagatcagcagggatagcggagatagtcaacctcagatttataggtatatccgccttacccaccttatcccggaaattctggagctggtagataactcagtccttaaagaccaggaaatgctccagattgccatgcgccctgcggtggagctgtcctacctgcgaaaagaagaacaggccgacttgttcgctatcatggacgagatggactgcaccccgtcccacgcccaagccatcaaaatgcgacagatgtccgaagccaagactggaggggaacggctggccaaagacgcccttgtttccattatgaaggaggaaaagcccaatcaaaaagaacagttcaaaatcccaaaagaaaaaatcagccggttttttgcgccggggacgcccacgcagaagatcgaggacaccattgtcaaggcgctggaactttaccgcaaacgccagcgcagtttagagagatagcccactcacaagggggaagtgcgcccatttgcagggaaacggcagcttgtgccggttccccctctccacacctcaccccttccaaacaacctaaacagcctaaaaaaagaagatatttggggagcctggatgtatatagaaagctccggcctcttttccacaggcagacatcgggctgcgaggaaaaccgggcgggcctctcttttttagacagtaaccaacacaagccgcagcacatcggaaacggtgtgcttttttgcggccatttcaaggaggtaacacgatgaaagcattgagaaagcccctgtccctgttcatggccatgctcatgtgcctgggcatattcgcagggacgggaaccacagcgtttgccgcaggggaaaccatgacgacgtatatggtggagttcccccgtgccagcgaccccaacaaggcaggctggggacattccgctatgaatttcttgggcggatggtctaccggcgaaaataacggttttaccatccacacgcaggattcctttaacgggaaagtcatctactgtatcgaacccggcgtcagcgttcattccggcgaccagtttactggccggggcgaggatttctgggatgattacccgtccgatctgaaccccactatcccaccggacaccatcaaggaatatatcgggcggattatgacctatggatggcagggcaacgccagcacctcatggatgaccgatgacccggaggacgccagcaagatggccggggcaatcgccacccagcttcttgtctgggaaaccgtcgtaggcgagcgcgacagccagtttaaccatgtggacgccaacgcccagggcaagaacaatatcgcggaatataccagcccggagaatcccctttacagcgagatcttcagccagtattccgctattgagagcgcggtaaaacgccataccatgctgcccagctttttcagcagcaccgcagacgccggggcctacgagctgaaatgggacggccagcagtattccctcactctcacggataccaacggcgtgctgggagattacacctttaccagcaatattaccggcctgaacttctctgtggacggaaaccagctcaccatcacttccagccaggccatcaaaggctctgtaacggtaaaagcagaaaaaatctccgcccagcgcagcggcgtagtggtatggacggatgggattatcggcggcggcaagcaggactttgccacctacggggaaaccgtgtccgattatatggtgggctatctgaacctggaagtaaaaaccggcaatatgaagctggtcaagacttccgaggatggacaggtagccgggatcagcttcaccattaccggcgaaggatacagcgccaccaagaccaccaatgaggcgggcgagatcgacatctccgacctcaatcccggcgtttataccgtaaccgagcagtcgattgacaaatacgaaccccaggaaagccagcgcgtgaccatcgtcagcggccagaccgccaccgtgacttttagcaacgtgctcaaacgcggcagcctggaagtgacgaaaaccagcgaggacgggctggtggagggcatgaccttccatctgtacggcacatccctctccgggcagccggtggatgagtatgcggtgacagacggaaacggtgtggcgcgctttgaaaacgtgctcatcggcacgggctatgtactggaggaggtggatacccccatccgttatgtggtgccggattcccagacagccaccatcgagtggaatgaagtgacccacaagagcgtgaacaatgtcctcaaaaagttccgtgtcactgtcaccaagagcgatgtggaaacgggcgcgccccagggcgacggttctcttgccggagcaacctatgggttgtataagggagatacactcatcgacagctataccaccgatgagaacggccagttcaccaccggatattacgtctgcgattcggactggacaatccgtgaaatcaaccccagcgagggctacctgctggattcctctatccacaaggtaggcgcggaaccggaattgtatgagattgagctgaacgacaccgccaacgatgtgacggagcaggtcatcaagggcgacattgccataatcaagcataccgacgacggggaaacccagatcgaaaccccggaatccggcgcggaattccaggtgtttttgaaatcagccggcagctatgaaaatgccaaggaatctgagcgcgatgtcctcgtctgcgatgagaacggctttgcacagtcgaagaagctgccctacggcacctatatcgtccgtcagaccaagggctgggaaggccgcgagctgatggacgattttgaagtgtatatcgctcaggacggccagacctaccgttatctcatcaacaacgccaactttgagagcttcatcaaggtggtcaaggtggacgcggaaaccggcgtcaccatcccctatgcgggggccgggttccagatttaccgtcccgatggcagcaaggtggaaatgaccttcacttacccgacgccgaccaccattgatacgttctacaccaattccgagggctatctggtaacgcctgaaaagctggaatacggcgcgggatattccctggttgaagtacaggccccctacggctatgtgctggacagcaccccggtttactttgatgtgaccgaggacaattccagcgtggaaggcggcgtgacggtgattgaagtcaccaagcccaacatggcccagaaaggaatcatcaaagtcagcaagaccggcgaggtattttcctctgtgacagaaaacgagggcgtttaccagccggtgtatgaggtgcagggcctgcccggtgcggtgtttgaaatcaccgccctggaggacgtctacaccctggacggcaccctgcgctactctgcgggcgaggtagtggacaccatcaccaccggcgaggacgggacagcccagagccagcccctctacctgggcaagttccaggtgaaggaaatccagttccctcacggcatggtggataccggcgagaacgtcaccaacgtggagctggtgtacgcaggccaggaggtggaagtcaccgaaacctctgccagcttctacaaccagcgccagaaagcccttgtgacgcttgacaaggtgctggagcaggatgaaacctttggcattggcatgaatggcgagatctccgccgtgacctttggcctctatgcccaggaggacatcaccgcagcagacggttccgtgatcccggcagacgggcttctggagatcgtttctgtgaatgagaacggccaggccgtttgcagcaccgacctgcctttcggcagcttctacctgaaggagctttccactgacagccattacctgctgaatggcgaaaccttcccgttcacctttgagtacggcgggccttctgttgccgtggtagagatttccgctaatgatggcgaggctgtcacaaacgagctgatccgcggcgaaatcaagggcctcaaaaccgatgagaacggcacgggcctgggcggggctgtaatcggtctgtttaagtccgatgaaaccgagtttaccgccgaaaacgcccttgccaccactacctcagcggacgacggcagcttttctttcaccaatgtgccttacggtgattgggtgctgaaagaactggaaagcccggaagggttcatcctctccgatgaagtgattcccgttactgtggaggaagatggacaggttgtagagatttcccttgccaatgagcgtgtgtatggtgatctgcggctcaccaaggtggataaggattatcccgataacaaattgacgggcgctgaatttgaagtgtaccgcgataccaacggcaacaaagagctggacgagggtgacgagctgctgggcaagctggaggaaaccagcaccggcatttacgagatgtcccacatcctctacggcggcgtgttcgtaagggaaaccaaagcgccggagggcttcctgctggatgaaaacgcctattatgtggagatcaccgagaacggcaagatttacgaggtagagaacgaggccgggattggtttcaccaacatggcccagactggctccctgcggattgaaaaaacgtccagcgacggcaaggtggagggcttctccttccgcgtgaccggggccaacggctacgaccagaccttcaaaacggataaaaacggcgaaatcttcatcgagggcctgcgcgtaggcgattacaccgtgtccgaggtatcggatggggccagcgccaactatgtgctgcctgcggataaaaaggtgacgattctggcggataagaccactgtggcgcaaatgcacaatgagctgcgcgacaccccgaaaactggtgacgacagcaagccgtggctgtgggcggccctgatgggcgtatccgctatgggcgctgccgccctgggcgttgcggcctatgtgggcaagcgcaaaaaggacaaccataccgcaaaataacggcggtttgaatctgtgtaaggaggaatgattttatggaactgaaagcgattattgccattgcgctggtggtattcatcatcggcggcctgattttcctgaaagtcagaagccggaagaagtaaccagccaggggcggccatgcggggccgccccttttacataccaaaaaagaaaggagctttgcagatgagagaacgatttgaacaacggctgttccgcatctttgcccaggctggttactccccggtgcagcttctcaccatcaccccggaggagatggtggaggtccccggcattaccgttcccaacatccgggcggtgctgtgcgtccagaacaaggtgctggcagaccggaataaagtccgcagcggcaggctggtggaggaattgctgaaagaagctgaagaaagcaggtgttgccatgaatgaactgcacctgctggacatactggcggctcggcatggctgtttcatctccgacttaaatctttcgcctatcctgcggcgggcggcccttttggacctgtgcaggatggatgagaacagctacccgctgtctcaatggcaggacacggtgcgctaccttaccggggatgaacgggattttgccagtgtaaaggaaatcaaagtatttattaaacaggaattggaggcagagtgatgaacgatgattccacagaaaaacgcatggccggtgattatgagattatccaggcggtgcagattggcgaccgcgaggttgtcctgggggaaaatccgcaggatgaaaccggcatgaagtatatgtgcgccttttgtcggcaaaacgccttatttgcagaatacagcgaagtgatggccagtgatgatttcccggagattgtggagctgttcggccagcgggttgccgagcaagcgcagaaaacccacatagaactcaataagccccgcatacagggcatagacgaccgccccattacagcggagggctgcatccccatttcctatgaggatgatctgcacgggaaaatcgtggtgataaagccggaggtgctgcgccgggaataccgcagggccactcgccagctcaagctctgtatgggaggctttggggcttccccgcacagcagggggtcagcctgttactgcgttgacctttatactggaaaagaaagccgctatgagcgcatggacgtgctgggaacgatacagccggaggaccttcccggctgggccaagcatggccttactgcgattcagcaggaacaggccaaaaagaaaaccgcaaaggagcgtgagcgatgatggattacagagaaaacgccggatatatcattacggattcctgtcatgtgggcgacagcgaatttgtcttgggtgttcatttgacagcgccccagcagtttgtcacctggaaatgtagtaaccggacggactacgattggggccactatttcagcgacctgttttccgcgcagaaggatttggtggcgcgggcgcaggaggaggtgcagtgcctggaggaacagcggcaaaacaccattgcgccggaggccccgccctattccccatggggcaaagtccaggagtgcgaaacgctctgccccggcgtttattccgtttctaccccagggcatggcggcgttatggtgcggcgggagctggcggaaaaggtattccgaaaagaagcgatgggctgcggttttatagcgagcggttatctttgctttgaggaagataatgacgcgcaggtggctctccgggagctgatggataaaaagatgatccaggctccggtgaacgggcgctttgcccccggtgcgtatgaggctgttatcaatagcagcgtgcaaattcaccaccccgaatattggcaggcaagggaaaaagccatatcggagcaaaaacgacaagcgaaaaagaaaggacgtgagcgataatggaactgacaattaccagcatgaccccggcggatcgcctgtatgcgtacaaccagagcagccagcttgaagggcaaaccggctgtatcggccatctgcgcggggattttggcgctggaaaagagttttacacttcctggttcgaccatcggagggaatacaagacggacgagtttaaggcggagcttgatgaggtggtcaacactctgcgggagaagaatgggctgctctgtacccgtgacagcatgaccaggttttgctatcagaacccggaggctgagtttgagggaaactactgcgccgagtatggttttaaggtgcagacgccgcagcacacctatatgctccggtgcaatcccaattatggagactacaacttttacctctacgcctacgtttcccgattcctggaacaccacatggaaaaggccaaacagggtatccggtttatcacgcccggctacaaggagctgttccgcattcccgacggcgaccacatccgcattttcactggcggcggagaaacccgcgaccgcacctgccgggtcatcgacgaaacccattttgaaaccagcggcgggtattccagcgccctgtatcatatctgcgaatttgcggagcgattggagcaaactcacgggagcgtgatcccgctgcgttcttctctgccggtgcagtgttttagtgtactgccctcatccggggagctgattcttctgaccaggggcgaaaaaggctacagcccttgctatgatttttcaactcctgacgctcaacagaaccgagagtttgcagacgaccgcaatgtgaagaatggcgttaccaaagcacaggaggccgccatgcttgccggctccatgcttggctggcagactcccgccgccgatcccagaaactatgacgagcaggggcagcctatcaagcccaggcagaaagaccggggtgaagcccgatgaaggaggaaagacacgttatctggagcaattatggcctggactatgaggattggagggatgacctggaggcggactacccggatttatccgaagatgagcgcatttccctgatgtatgagatcaatggggattacctggatgatgaacgcgccaacctcaatgtgcagctctcccaaccgattttagtcgtaggcgacctgggcctgtggaatggtcggcgcatgggatataaggaaatccccagcggcaatatccgggactgcctgtattccgatacggattattccacctggtatgtggaccggctgggtgatctgcggtgcgacgccatccaccatgatggcacgaacttttatctttaccgcgtttacaaggacagcgccagcccttctcaaattgaactgctgaaagaaaaactatatcgcggcattgcaacccgcgccgatattacgagagtgacccgcaggctgggcgacgacatcgccaaagtctacgggttttccattccccggcagcggcaggccgtcgccatggaaagatgaggtgataaaaatggcgtctttaccgcccgtaaaactggatacgcatgaggactggttcaacttgctgatgacggttctccatcagcaggcggaacagaacccctatgaagaataccgggagatggctcaaaagctgatcgaccagtttatgcgctatgggaggccctttgttgacagtgaccatgcgccctgcgtggcgcttcggatgtacccgaaggaggccggaaataccatctggctgttgctgctctccctgtgcaatcaatatgaccctgataaggattacagcgcagaactgaaagctgcgaaaaaagaataagaaaaggaggggcaaccgatggcgatacgatataaagccttgacggagctgtaccaggaaacgcagcgcagcgtgacagctcctgaccagtggcgggcgtttctggcttctgcctgccgcaactaccggctttctttcgatgaacaactgcttgtctacgcccagcgcccagacgccaccgccgtcctggagatcgagcgatggaaccggcaatttgggcgctgggtaaaccggggcgcaaacggcattgccgtttttgacggtgaacacaatggaaaaccccgactgaaatactactttgatatttccgatacccatgaggcccggttcccccgccccgtccccctttggacggtgcgggaggaatatgcgccggacatcattgaaacgctggaaaacagctttggagagctggagcgcaaggaggatttgggtgaagcactgctctctgcggcaaagaacgccgtggaggacaatatgcccgactacctggcagaattgaaaaccctcacggaaggcagctttctggaagaactggatgagctgaacctggaagtggaataccgcagggcggtgcaaaacagcattggatatatgctgctggtgcgctgcggccttgacccgtctgaatattttgaggacatggatttccgggatgtgacggactttaacaccccgcagacgttgaacgctttaggcgtggccaccggggacatctcccagatgtgcctttccgccatttcccgcacggttcttgccctgcaaagacagccccaaaaagaaaatcgcacatttgaaccccagcagaaaaaccagtatgctgtaactgaacaggaaaacacacagctggaaaggagttttgaatatgaccgagatcacttacaccaggcagggcgactacaatctgccgaaccttctgccgccccaggaggagccggttccccatgggaaatacgcattgcttcggaagaaattcctcaaggagcaccgcagggtgacgtacaccaacctgctgaccagcggcaagctgaacagccatctggcggagatccagcagaccgcccagcgccggatggagcagatcgtggcgcagatggccaagaaccagggcgtgacagaggaactgaaagccagcgaccagatgaagtgggtgcagatgatgagcaacctgcagaacgcggcggaggaaacggtgctggcggagctgatttacagctaattgatgaaccggaagaaagcgcaggtggcgaacagctccctgcgcttttggatgaaaagcagatcatggccatcatcgccaacaaagatgatgacctgaaatataagaaaaatcagatcgagcttttcttttcggttcacagcgacgttcaggaacgggccgactacctgaaatccgcttatcaggaccggtacactgagatcatcgctgacgggcagcgcctgggatataagccccaggagaatggcctgctcatgtgggaaggctcttacccatcccgcaccagggaatctgtattttcctgggaagtggtggcaggctggaccgcccagcttattgacaaaaaagaatacttcattcagacggacatcccgcagctccctacccaagagagccagcagatgtccctttttgattttgcggcgtttcagcagccaacccaggccgagggtacggccaaaccatccattttccctcacccggctctgcctcagcaggtaatcgacgaggcgctgtgcattggtgctaacgaccagaacagccgcctcatcatctgcgcctatttcaaaaaggataagccggacaatgccaggttcctggcagagcactatggagagaacggcgctggcttttatctggatggccgacagtatgccatctggtacaacgccgagggaatccgcattgcccagggcgaaagcgcccagcgttccagcgccaccctcatcccctgggaacaggcggcggcccgtatccgggaactgctggacttgggccgatatatgccccagagcgagcttgaccgggtggatgagtatgagcgccagcaacgggccgcgcagctatggtatctccggcaggattttgcagaaggcactgccgacgcgggctatcttcccacggtgaataccatttacggtaaaaatcatgggtttccagaggaaagcgccgccataagcgatttgttaggccatccggaggggctgcagaacctgcgggatgagctggagcagtttgtccaggcatacagagagaaccgggaactgctgcgattccatttccaccgtccgcaaaaattgctggagcagctttccgacctgcagcgggaaccgctgcactttaccgccgccgaagggtacgccccccagcggcgttttttcatctccggggacgagatcgacaaccttctccggggtggaaaacgcagcaccgattaccggctggccgtgtattctttctatcgcaaccacacagagcgcaaggaacgggagaatttcttaaagcactaccacggcgagtacagcggccattccagtgggaatgacgatgtgacctaccagctcagtaaaggcgtttctttcagccacggcagtatcaccgccccctacgccaaggtggagctgaaatggaacgccgtggaaaagcgcgtcagcgccatgatcgcccaggggcggttcctcaccgatgaggaccgcgccgccatgccgcagtatgagaagcaccagcttgcccggaatatccgcactttctttgaaaacgtaccccaggagcagccccacccctatccctttggctttgactattgggacgcggtgaagctcatcgagccgcagcttgacgacccggcccgtgtggaagaaatctatcagatgatggtccccatttgggaggccaccccgcaggatgacaggatgtacgccctgcgccagcaggcgtttgaaaacctcactgccttccggcagggaaccttcacgctctttgcagagcacaaggagcctgtggttcccaccatgccgcaagccaaagcctacgacctgggctacggctatttgggaaacggcgtcacggtgtggaaccggctggaggaggaacacggtgactacaaaacggttgcccacatcgccccagaccgcacggtgaccttctacgaggaggaaatgccccaggcagtgcgggaggaaatccagcggattgctgacacttcggaaatgaccatttccgccacccaggacgcgccggtgttcaccgtgccgcccagggcgcaggaaccaccccaaaaagaagaaccggtagacccctacccgaagctggccgcccaggtgctgcgttttgtgggagagtttgatggttcccgcatgggttatggtgaggatgacgcccaggcggtggaaaatatcgcccggcagctccatgaccccgttcagagagaggaaatccgcagactgcttcaatccttcctggaccatgcggacctggaagaagaaatcgcggtggacatcaccctctgtatggagcagatcgcggagctgcccccggcccttaccccggaacaggcgcagatagaagaaatcgccggttatctggaggaggccggatatgcggtatccagcgaactggtcgaagaaggtttgatggattaccgtgcccatggcggcaaaggtaacagccaggatgttgccgacttcattgagcgcgagtttttgtccgaggagccggaacctgcttcactggagattgccaaagaatttatcaacgatttctgcgaggccgagtatggcagtccagccgatttcagtgatctggaaaaggtgggcattgcctacaccactgttacggatgaggaaattcccatccaggtcaatgccgacttggtccattaccgcattgagcgttatctggacgggcagtttttggagcgcaggcagtatgagagcctggatgaactcatccaaaatgagctggccgaactggactttgaccaactcacctctgtggaccaggactatttcaatggaaaataccctcccgacatagagccatacatcttctgcgagtggagcgaaagccccgtgtttgaagatggaaaacgctacggtatccgtgaatttgacaccctgatgaaacaggcggatgaggagcaggtggccggtgcaaaggctgctcttgaaaaatacggcacttggcaggtgtggtacgaatccgatgacccagaaaatgctcggttcctggggtatgacaaggtgaaatttaccgtggtcatgccagatggcaccacctacaccgagcgccaggatattggggacggtgacgggggcgttctggacttcctcgcacaatatcccaagtaccaagacatccttcccttgttgcagcaaagtacaccaccacaaaatgattatatgcttttaagccgcctgaaagccgactgcgactatttcttgggcgctggcgggcgggcagaaaagcacctgtgggctgggaacgtgcgagagcaaatcgccaaaatgcgggaactctatgacgccctgccggaaaaaccggaatggctcaccatggaggacatcgaccgctatgcccagcgcatggagccgccttacgaagtggtggtgtaccaccactttgaaaatggctttgatgaacggctggattaccaaacgctggcggaggccgaacaagctgcgcagaaatatgtggccggcactatggagggcgaggatggctttgcctatgatggcgcgggtatctatgaccttcaggagaacagatggctgcgggtttacgggaacttccctgatgaacgagccattgagcaggcaaaacaagcccctgccgcagaggaaccgtcagccagcccagagcaggccgatttacagcctaaaaaagaagaagcactcccactgccgccgaagcacccccgccgtgagcgcattactttcacaaccctgcacccggaggtccccagggatcagcgccatgatttccacatcaccgatgacgccctgggccacggcacccccagcgagaaatacgcggccaatgctgccgccatccgcaccttgaagcagatcgaagctgaggaacggctggccacgcccgaagaacaggaaatcctgtcccgctatgtgggctggggcggccttgcaaactgctttgaacaaaccagcccccattatgaggaactgaaatctctgctggattcggaggaatacgcagcggccagggccagctccctcaccgccttttacacgccgcctgtggtcatccggggaatctataaggccctcgctcagatgggctttacccaagggaacattttggagccatcctgcggcaccggtaatttccttggcttgctccccacagatttggcgggcagcaaagcctatggcgtagagctggattccatttccgggcggattgcgggccagctttaccagaatgccaacatttccgtaaacggctttgaaactgtgcaaatgcccgacagcttttttgatgtagccgtgggcaacgtcccctttggggatttcaaagtgctggataaacggtacgacaagcaccactggctgatccacgactatttcttcggcaagacgctggacaaggtgcggctcggcggtattgtggcgttcattaccagcaaaggcactctggacaaggaaaactccagcgtccgaaagtacctggcacagcgcgccgatctcattggggccatccgcctgccggataacaccttcaagcggaacgccggaacggaagtgaccagcgacatcattttcctgcaaaagcgcgaccacatcaccgatttagaccaggattgggtgcatttggacaccgatgaaaacggaatccgcatgaaccgctatttcgtgcagcacccggagatgattttgggcgacatggtgatggaatccacacggttcgggccggacagcgcctgcaaagcccgcgagggggaagatttatccgagcagcttgccaatgccatccagtttttgcaggcggaaatcaagccctatgagctggaggagctggacgaggaggaagatcgctccatccctgccgaccccacagtgaagaatttcagctacacgattgcagatgggcaagtatactaccgagaaaacagtctcatgcacccggtggaagtctccgtcacggcggaaaaccgtatccgtggcatgatcgagctgcgggaatgtacccgcaggcttattgagtaccagaccgaaggctacccggatgaggatattgcagccgagcagcaaaagctcaacgccctttacgacagcttcaccgccaagtatgggctgctgaacagtcgcggcaacaagctggccttttcggaggactccagctactgcctcttgtgctctctggaggtgctggatgagcagggcaacctaaaaagaaaagccgatatgttcacccggcgcaccatccggccccatgtggctgtcaccagtgtggatacagccagtgaagcgttggcggtgtccatttcggaaaaagcccgtgtggatatggactatatggcagagctgtcgggtaaatccccggaggaactggaaaaagagcttgccggggtgatctaccgggatattcgctgtgcggagaacccggaggacatcctgccttctttggcggatttgagccgctatcctcttgtcacggcggatgagtacctttccgggaaagtgcgccaaaagctgcggatggcaaaagcattcctggaagtggcccctgacaatcagaaggaaaccgcccgcagaaatgtggaggccctggaagccgttcagccccaggatttgggcgctggagaaattggcgtgcgcattggcgcgaactgggtgcccatcgaggtgtaccagcaattcatggtggagctgctcacccccaattactatgtgcgggatcgtattaaaatcctgcgctccgaagccaccggccaatggagcatccgggagaaaaacgccgaccgcagcaatgtgaaagccattaccacctacggcaccaagcggatgagcgcctaccacatcttggagcagaccctaaatcaaagggatgtgcgggtatttgactatattgaggacgagaacggcaagaaaaagcctgtcctcaacaaaaaagaaaccgcgattgcccaggaccggcaggaactcatcaagcagaagtttgccgagtggatctggaaagacatcgaccgccgggaactgctgtgccgtgtttacaacgaaaccttcaacggcgtccgcccccgtgagtatgatgggcggcacatccggtttgagggcatgaacccggaaatttccctacggcctcatcagatcaacgcgattgcccatatcctttacggcgggaataccctgctggcccacgaggtgggggcgggcaagacctacgagatggtggccgctgccatggagatgaagcgtttgggcctttgcaccaagtcgctgatcgtggtgccaaaccacatcaccgagcagtgggcggcggaatggctccagctctatcccagcgccaacattttagttgccacgaagaaagattttgaaacccagaaccgcaagaagttttgcagccgcattgccaccggggactacgacgccatcatcatcggccacagccagtttgaaaaaatccccatgagcctggagcgccagcaggccattttggagcgccagattgaagaaatcctggaaggaatcgagcaggccaaggcacagaaggcggaacgctacacggtcaagcagatggagcgtacccggaaatcgctggagacaaggctggccaagctcaacgaccagagccgcaaggatgacaccgtcacctttgagcagctcggcgtggacaggctctttattgatgagagccattattttaagaacttgtttttggcgacaaaaatgcgaaacgtgggcggcattgcccagaccgaagcccagaaatccagcgacctgttcatgaaaacgcagtatctggacgagttgaccggcgggcgcggcgtgatttttgccaccggcacccctatctccaactccatggtagagctttacaccatccagaggtatttgcagtacaggctcctgcaggagatgggccttgtccatttcgatgactgggcggggagcttcggagaaacggttacagccatcgagttatcgccggagggcaccggctaccgagccaaaacccggtttgccaagttttataacctgccggagctgatggctgctttcaaggaggttgccgacatccaaacagcggatatgctttgtctgcctgttcccaaggcaaacttccacacggaagtgatccagccctcggagcttcagaaagagatgataagggggctggcggaacgggcagagaaaatccgtgccggtggggttgacccccatgtggacaatatgctccgcattaccaatgacgggcggaaattggcgctggatatgcggctcatcaaccctctcgctgccgacgaccccaatggcaaggtggctgtctgcgcccggaatgtgttccgcatctgggaacagactaaagaaaaacgctctgcccagcttgtattctgcgacctgtccacacctactaccgatggctctttcagtgtttatgacgacctaaaaaagaaactgatggacgccggtatcccggaagaagaaatcgcctttatccacacggcagacagcgaagccaaaaagaaggagctgttttccaaggtgcgcgccgggcaggtgcgggtgctgctgggttccacggccaaaatgggcgcaggcactaacgtccaggataagctcattgccctgcatgacctggactgcccctggcggccttccgaccttcagcagcggctggggcgtatcgtccgccagggcaatgaaaatgaggaggtggaaatctatcggtatgtaacggaaggcacttttgacgcttacctctaccagcttgtggagaacaagcagaagttcatcgcccagatcatgaccagcaaggcccccgtccgtgtggcggatgatgtagatgaaactgccctcagctattcggaaatcaaggcattggccaccggcaacccacttattatcgagaagtgcaacctggatatggaggtggcgcggctcaatatgctgaaagccagccacttgaaccaggtgtacgctctggaggaactggtgtatcggaaatacccggaggaaatcacccagctcacggaacggatcgcgggctatgagcaggatgtggcgctggcggcggcccaccccaaggcccaggagggcttctgcggcatggaggtggatggcaggcactacaccgaaaaagagggcgccggcaaggctatcattgatgtttgcacccgtatgacaggttccgacgctgttcttttggggcagtaccggggcttttccatggtgctggcttatgatggcaggagcaacgagtatcggatcacgctcaaaggcactctttcccatacggtgacgctgggggcggatgtgttcggcaatatcacccgcctggacaacgctctggaaaaccttgcaggcagcctgcaggccgagcagaacagcctggaggaaaccaaggcccagcttgaaaacgcccgcacggaattggctacaccttttgcccgcgaggaggagctggcggagaaaacagcccgtttgaaagagctgaatattctgctcaacatggatgagaaggacaaaacattgatggacgataccccagacgagggcgaggatgtgcctgcccggagggttgcggagctggcacggtaaaggaggatacgatgaccaacgaagaattaaataccaggctctatgagaaaatgtttgcggaacaggagcagttccgggattggctgctctcccaaccgccggctgagattttgaaccatgcctatgagtacacggtgcgggaggacatcctgatgtctcttgaataccacgatctggaggatagtcaggccagggcgctgctgaaatctgacaagcccttgaagcagatttttgagaggtgggagaaccaggaaacctcttatatggatacggtatgggatactgtccaggaacaggccagggccgccgaagccaaacagaaagccaaagcgcagaaagaaaggtgattgcacatttgccattgcgctgcggggcaggtatagtataataaaaatcgtgataaggggtgatgatagatggacgatgatagatggacgatagctactgcctgctcccggagcgcatttccgagcagttttctgaaatcgacagcgacatcgtgatggatttggcggctgccagcccggaatataccgagttgaaggcccagatggaggaactgaaacgccaaaatcttgtgattggcgctctgctggagggcaagggagaactttcttttaccgctgaggagcatgaagccttgaaagaatttatccggctgtatatgcgggccgataatatggaacgggaacacatctacttccggggccatgcagacggatttgcctatctgaagaaaatcggcgctttcaaaactgaatagttttttgggcggcatggaaaaatccatgccgcttttacatatccaaattcattcgcacccccaaaaaggtcttgaacaaaacaagtttttacggattaggagtaaaaactattgaaattcttggagtttttggatatggcttaaagctgccgcccaaaactgcacattccccattcatatctgcatataaatcgcaaaagtatatgcagaaagtcgattggagcaatccagtcggctttttccatatctgaaaagagtacagccccttttacatagtcagctaccccacatggggcggctaatctatggctatgtgaagggggctgtatttttttatgcctttttacgattcagaagccatcgaacgggcaaggcaggtggacctgctcacctacctgcaaacctgcgaaccccaggagctggtccatgtgtccggcaacgtctactgtaccaagacccatgacagcctgcggatttccaacggcaaatggtgctggttttcccgcgggattggcggttacagtgcgctggactatctcatcaaggtcaacggctattcctttttggaggccatggaaactatctccggaagggctgccatcccgccgccttcctttgtgccagcgccgaaggaggaaaagcccaagcacctgcttctgccccaggccgccccggataatcgggcgatgatggcctatctcaaaggccggggcattgaccaggagattttggactactgcgttcagaccgggcggatttatgagagccggaacaagggccacagcaacgtggtttttgtgggcttcgacaaggatggcaaggcgcggttcggctgcctgcggggaatcagtgaagcccggttccacggggatttaagcggcagtgataagcacttttccttcgccctgcccgcttgcgtggaaaatccggcagtccatctgtgcgagtgcgccattgatgtgatgtcctatgccactctctgcaagctggacgggattgactggcggcggcacaatctgctgtccctggccggggtgtaccagccgaagaaaaagatggaggaaagcaagctgccggtggccctcacccgatttttggatgaccacccccatgtgaaaaccgtctatctccatttggacaatgacacggctggccggctggcggccaaggcaatcatggctgtcatgccggagggctaccgtgtggagaacaaaccgccgccccgtggaaaggatgtgaatgattttctgtgccaccggctggggattcccattcggggcagccacagcaaagagccggagcggtgagttgccagttttgcagcttcgacagattctccctcttgcaaattgttatcatatatgttaacattaaagcagtgaggtgagagtatggatgaactgcgcaaacggcagaaaatcatatcccagcttgtggaggcccgtctggagcagggcatttcccaggcagaactggcaaggcggctgggaatccagcgttccggcattaaccgcctggaaagtgggacacagaaccccacgcttgatatgatcttaaaaatcgcctcggcgctgggaaaggatgtttcactggaactgaacgacaaggaggagcctatgagtaatgtttacagtctccgcatttatgatacggagctaatgcgcttttccatggaaaagcagggcttgtccggccttgtggctgaaatcttatacaccaacgaggagcaggcccatttgctgcctttggatatggagcgcaccggcgagggcgtcattcattggctggagcggcgggttatccccaaaaaccgcgcctttgtggacgagattttgaaaacccttggcctcagccacaacgacaccaagggaatcatcgacgtgtgcaaggggctgtcgctcaacgacagctattgggtggtgccggaaggatttgaggggggattctcccaatacaatctttacgaaaatcgcttttccgagatactggcgctggtggcctataccggcgcaggcgggagcaggcaggcgtttaccacatccccggagctgaccacaggcggtatgctgcccaaggcgtggcgatatgtggagcacgatgggatttatctctacaagggcggcacgaccggcgcgtccaatgcgggccgggagccgtactgcgagtattatgcttcgcagattgcggaaaccatgcgtctgaacgccgtgcattatgacctggagaattggaaaggcattaccgcctctaagtgcgccctgtttaccaacatcgacacagcctatatccccatcgggcgcattgtccgaaccgggggcattgccgcctgccttgcctactacgacaagctggggccggagttttccgagcaaatccgcagtatgctggtgtttgacgctctgatttacaatgaggaccgccactttggaaactttggcgtcctgcgggataaccacagcggcaacattattgcgcccgcccccatttttgacaatgggctgtccctgttctgctatgccggtaaggaagattatgcgaatctggacgagtatgcaaaaacccgttctaacccctacaacatctcctatgaggaagtgtgtgcagaggtcatggggccaaagcagaaagagcagcttcgccgcatgatcgggttccggttcaagcgccacgaaagcctgggcctgccggaagaacatttgcaggccattgagaagcatttggagagccgggtgcgtaagctgctggcaatccccacccgtcatctgaaacaggagaaggcgcggtaaaaacgaatctcttttttggagagcgttctgaaaatggacgctcttttttgctgcccatttttagagaggagcgtgagtgatgaaccattatgatgttaccatccgggaaacgctggaggtgaaaatgaaggtggcggcaaacagccgggaggaggccgagcagtttgccagggaccaatggaaacgcggcgaagtcgttctggacgccagccattttaccggcgtggagttccatgccaagcggtatttccgtgaccggggcgagcgatgagttcttttttcgcctgtcccggattccccgcaggggaatggaatgtagctgtaccagcaagcatcgcctttgtgataccacaaaggccgcttgttagggggaacgccccctaataccccttttgaaaggatggaggttttcatggaaggattgtttttcgccattggatttctgctgggcggtgtggtcggcgtgctgattatgtgcctgcttcaaatcaaccgcataggcagaaaggaggattcggaagaatgagaaaacgcaacgtacacgtacagttttggctggacaaaaaagaggcggaagccttcaacaaaaaagtaaagcgcagcggcctttcccgtgaggcgtacctgcgccatctggtgaacggcctggttccccaggacgcgccgccgcccgcctactacgactttatgcgggagcttcaccggattggcggcaacctcaaccagatcgcccagaaagcccatgtgctgggcgtcattgatgagcgccgctatgatgaggaaatgcgaaaattcgaccagctcgtccgggacatcaccaaagcggtgatccttccccgcgctatggacacgaaggggtccccgcgaagcctgcttcgtggggagaaggagcacccgcgaagcggtgagccttttgacgcttgcggcaaaagcggcaagcggagcgcggtgtgacgtggctaccacgtctatctggcgggtgaacggctggctgggcaaggttctcatctatatcgagaatccagataagaccgaaaatcctgatttctttgaaaagcaggatatggatggcaaggaggcccagggcctatccgatgtgatcgagtatgccgtccagcagcaaaaaacaggcaagacggtggaaagcgaaggcgaaacggtcatgcggcagtttgtttccggggtgaattgcagcccctctacggcccgcgatgagatgatagcggtaaaaaagcgtttcggaaaggagggcgggactgtggcctaccacggctatcagagctttgcccccggcgaggccacgccggagctggcccatgagatcggccttgccctggcaaaaaagctgtggggtgaaaaataccaggtgctggtggctacccatctggacagggaaaatcatctgcacaatcattttgtagtgaacacggtttccttcgtggacggcatcaagtaccatcgtaccgagcaggattatttcgatatgcagcgggaatccgaccggctgtgccgcgagtatgggctttctgtcattgagaacccccagcggggaaaatccaagcactacggggaatggcgggccgagcaggaaggccgccccacctatctctccctcatcaaagccgatgtggatactgccatccgccagtctatgacggaacggcagtttttttatcatctgcggcagatgggctatgacgtcaaggtgggcaaggatattacggtccgcccgccgaattacccccgtggacgcaagctcatgcgtaactttggcgaggactactcgatggagaacatccgcaggcggattttagcccagcgccgcccccagcgggaacacaggccggagccgtttcggtgcaggctacacggggatttgaaacaggccaaaaaggtgacggggttccgcgccctctacttccactactgctatctgctgggggtattcccccaaaagcagaaccgcccgcccaggcgggtgcctcatgcactgcgggaggatttgatccgggcgcaggagcttaccgatgaagcctgccttctttcccgccaccgcattgacaccctggagcagcttaacgcctatcggtccgatgtgaaatctcagtttgccggcctgacggaacagcggaaaagcctgtaccggaaacttcgcaccaaggcagtgctggccgaccctgccaggcaggagtatatccgggctgagatctccaaactatctgcgcagatcaaggagctgcgccgggaggtgaagctgtgcggggatattgccctgcgctccacttccatcaaggataagatacaggccgcccgtgaggaagtctccggcagggatgagaaagcccgccaggagccggagcagggccgggcggctcccccaggaaggagatgatttttgatgtataactcaggcgacgcggcggagcaagtggtacggatgagcctggagggcgctgaatttgccctcaaaatcaccggttctgctgctaaaaatctggccgccgccctttacacggttctgaaagaccagaaaaagaccaagggcaaagcccgcattgaagccatgctgcgggagaagcgccccttaaaggtttacaccatcaagaaggaggattgcccggagtttgccaagcaagccaaggggtacgggattctttatgcgcccatcccggtgaagaaaggcgacgacaccatcgacattctggtgttcgaggatgacgctgccagagccaaccggatcgtggagaagttcaagctcaccgttgtggatacggcttcgatcaaggaggatattgagaaatcccgcgaacagcgcggcagcgaacccgccgcgccggagcaggccatgccggaaaagagtgtggacgaccagcttttggatgagctgatggaaaagcccacccagaaagaaaaagcccagccggaaaatccggcagcggagaagaacgccccttttgccccagcggcggaaaaatcccctccgtccgagcctatctccgagagcagcagcaagtccgcaaggggtacttctgatggagccgagaagccttccgtccggcaggagctgcgggacatccaggcccagcggaagaaggaggcggaggctgccagggccgaggagccggctgcaccccagaagaaggcggctcagaaaacaacccggcaccagccgcccaaacccaaaaagaagcccaaatcgaaagagaggtaatctgtgatgaataattttgacgatctgtttgaacagcagccccaggcggaggccgcgccgcaaaagcaggaaagccagaaagagcgccccaagcgccagtggtggcagatccgggaggaaaaacagcgaaaagaagcctatgccaccttggaccggatttttggagagttctccgagggtacgggcagtatggaggcatatctggatgtgcagagccgttttcccttccactctgctcgcaatgcacttctgattggggataaatgccccgacgcggtgcgtgtaggcggctacaaggagtggcacgcccaggggatcgagattttggaggatgagaagcgtttgcccatcatcattctggagccgggcaaggcataccggcgtgaggatggcagcgtgggccagaacttttacgccaaggaagtctatgatatttcccagactacggcgcgggatcaggttcagccccaggtgcgctacgatgaccgtctgctcttaaagggcctgattgccagttccccggtgcccatccgggccgtggaggaactgccacagggccgtggggccatgttttctgcagagcagaacgccatcctggtgaaaaagggcatggacgcgccggacatcttccgctgtgtttctctggaggttgccaacgtgcagcttgcccaaagcatggacggctattccagagagacagatggctacaaagcctatgctgtcagctatatgctctgcaagcggtatggcgtggacgccaaagagtatgagatttccaaactggacggcgtgtttcaggggcaggtccccagggaggatattcctgctgccctcaccgatatgcgggatacgttcaaatccctcaatggccgtatggccagggctatgggcctcacccgcgacagcaagcagaaggaacaggaacggtaaaggaggagtagacccatggaaaaacaggaaaaagtcgtcctcaccctggacagctatgagcatgggatcatgattcgcgccctcaacgaactgcgcaacgatatgctggaggaacagcgtgaccccggcccggtggaggacgttctgctgaaaaccattgacgccccagcccaaaaagacaagaaagcgaagcgccgggatgaagccagataataaggcgggcggcccctggctctatgccctggggctggtcccggtgatctggttcgccctgctgattgcgcctgccatttccgggggactttcggagatcgtcagcgccctgcctgcggcaatgaacaatccattcaaaatcgtgtggtgtgaggacagtgtaaaaactgtcctcatttttattgccgcctatgggctgggcattggcatttatctttcttcccggcgcaattacagacgaggtgaagaacacggttccgccaaatggggcgatccgcgggccgtgaataagaaataccgggacaaggatccgttcaaaaaccgcatttttacccagcacgtccgcatggggctggatggccggaagcaccgccgcaacctcaacactttggtggtgggcggcagtggtgcgggaaaaagtcggttctacgccaaagtgaacatctgccaatgcaatacgtccctttttattttggactgtaagggggaactgcttcgtgactgcggcggcctgttggaacagatgggctatgagatcaaggtggtggaccttctgaacatggagaaaagccattgctacaatccctttgcctatctgaaatccgacaacgatgtgcagaagatggtgacgaaccttttcaaagccaccactccgaaagggagccagtccaacgaccctttctgggatactgcggccagtatgctcctcatggcgctggtgttttatctgtggtacgaagcgccggaggatgagaagaatttccccatgattatggagatgctccgagccggggaggtgcgggaggatgatgattcctaccaatcgccgcttgacgaactgtttgaccggctggaaatgcgctccccggatcacatcgctgtgaagtattacaaggattaccgttccggctctgccaaaacgctgaaatccatccaaatcaccttggcgtcccgcctggaaaaattcaatctttcttcggtggcggctcttaccgccacggatgaactggacctttccagcctgggcgagaaaaaagtggcactctttgccctcatcccggacaacgacgccagcttcaatttcttggtaagtttgctgtatgccagcactttccaggaacttttttattctgccgaccgggtacacggcggtagcctgcccgtaccggtgcattttctcatggatgagttcgccaacgtgagcttgccggatgatttcgacaagctgctggccaccatgcgctcccggaatatcagcgtttccatcatcattcagaacattgcccagctcaaggcgctgtttgaaaagcaatgggaatccatcatcggcaactgtgatgaatttttgtacctgggcggcaatgaaacgtccactcacaagctgatctctgagaactacctggggaaaagcaccctctggctggacacctacggcaagagcaccgggcattccggcagctactccaccaacaaccagatcacgggccgggagctgatgacgcccgatgaggtccgtatgctggacaataacctggccctgctctttatccgtggcgaagcgccgctgatggatgaaaagtatgaccttttgaaacatcccaacatcaagtacaccaccgatggcggcgcgcctgtctattcccacggcggcactgaaaacgccgtggcggatatgaccattggccgcctcacccccggcgaccttgccaatatccaggagccggaaaccctttacgaacttctgtccgatgaggacatggagaatatctttcaatttaaggaggacaccaaaaatgaaactgtttcataaggaaagcaagcagaagaaagaaacccgcagcctgcccatgggaaaaaagagccggagcgcctttgctgtttatgcagccctggtgctcatgctgtgctgctgcaccactacggcctttgccgccagcgacccgttgactgttatcaacaacctcagtgatttcatcttcggcctgatccgcgccgtgggtatgatcctgctgggcttcggcgtcgtgcagatcggcctttctctgaaaagccatgaccccagccagagggctaacggctttctcaccttggccggcggtgttgtgattacgtttgcgaaggagattttgaccctgattaccggctgattctaataacggcagtgtgggggcaggcccatggcggcctgccccttaccgttgccggaaaggaggttgttgaatgtccgataactgggttgttcaaaatttgcaaaatgccctcgacacctggaacaagtacctgtccgagatctggcagctcatcacccaaagcccggaacagtttaagggtggctccatctggggcgtcattgtcaacatccacgacgcggtgcgggccattggccttgcgcttttggtgctgttctttgtagtgggcgtcatgcgtacctgcggcagctttgccgaggtaaagaaaccggagcacgccttaaagctgtttatccggttcgccattgccaaaggtgtcgtgacctatgggctggagctgatgatggccctctttaatatcgtccagggcctcgtttcaacaataatgaacgcggcgggctttggaaccgcgcagcagacggttctcccccaggagattgtcacggcggtggaaagctgcggctttttcgagagtatccccctctgggcggtgacgctcattggcgggctgtttatcacgatattgtctttcattatgataatgaccgtctacgggcggttttttaagctctatttatacacggccatcgcgccggtgcccctgtccaccttcgccggggaaccgacccaaaacgtgggcaagagttttatcaagagctatgccgccgtgtgtctggaaggggccatcattgtgctggcctgtatcatcttttccctgttcgcggcggccccgcctgctattgaccccaatgcggcggcagtcacccaggtgtggagctatatcggggagctggtctttaatatgcttgtcctcgtgggcgcggtgaaaatggccgaccgcgtggtgcgcgagatgatgggcctgtaaaaaaggaggaaaataaatgcgttatcaaacctatgtgctgcacttgattgatggaaccgccatcccaatggtggaggattacgacctgcccgctgaaaagggaattgtgggcacttctccaaagcagccccagacgagatttttaccgtgggcgaccggctgctgggctttgcctatatacccaagagcagcattgtttacctggaaaccggcgatgtgattgtgaggtgatattttggaagtcaagatcaaccgggaaatccgcaactacaccgaatccatgtttttcgggctgagtatgcggcagttcatcttttctgtcctcgcctgcagcgtggccgtgggcctttactttatcctgcgcccctactttggggtggaaaccctgtcctggatgtgcattttgggggcggccccctttgccatgctggggttcatcacctatcacggtatgacggcggaacaatttatctgggcgtggctgcgctcggaaatgctggagccgaaggagtttaagttcgaggacagcaactactactatgcggccctgaaagataccatcgaggagctgcaaaccgggcggcccggcaagaagcgccggaaggagccgaaacactttagcaaacggaaggaggccaagcatgattaagaccatcaaaaccatgtccaagcaggaaaaggagcgttacaccgtcccccggaaggtgcaggatgtgatccccgtccgccgtatctggccggacggcatcttccttgtggggaacaagttctccaaaacctataaattcagcgacatcaactatctggtggccagccgcgaggacaaggaatccatgttcctcacctattcggagctgctcaattccctggattccggtgcggtgacgaaaatcaccatcaataaccgccgtatgaatcaggccaactttgaaacgtccatcctcatgcccatgcagggggatttccgggatgagtaccggggggaatataaccaaatgctgctggataaagccaccggagccaacggcattatgcaggaaaagtatatcaccatctccgtggtgaagaaggatattgaggaggcccgcgcctatttttctcgtgtgggagccgacctgatttcccactttgcggcccttggctccaagtgcgtggagctggacgccaccgagcgcctgcgtatcctgcacgacttctaccgccaaggcgaggaatccgagtttgttttcaatgcccgtgagatgatgaagcggggccacagcttcaaggactatatctgcccggacgggatcgaaaaaaagagcgactatctgaagctgggcggcaagttctgccgggtgctgttcctcaaagactacgcctcttatattaaggataacatggtgacggagcttaccgatttcaaccgaaatctgatgttctccatcgacattgtgccggttcccacggatgaggccgtgcgggaggtggaaaaccgcctgctgggtgtggaaaccaacatcaccaactggcagcgccgccagaacgccaacaacaacttctctgctgtggtcccctacgatatggaattgcagcgcaaggaaagcaaggagtttttggatgacctcaccacccgcgaccagaggatgatgttcgcggtgatgaccctggccatcaccgccgacaccaaggagcagcttgacagcgataccgaagcggtgctttccgtggcgcgaaagcacatgtgccagcttgcggtgctcaagttccagcagcttgatggcctgaacaccgccctgcccatcggggtgcggaaaatcaacgccttccgtaccctcaccacggaatccctggccgtattcatccccttcaaggtccaggagatccaggataagggcggcatttactttggagagaacgccatttcccacaacctcatcatgtgcaacaaggcgaaccttttgaaccagtcggccttcctgctgggcgtccccggcgcgggcaagtccttcagcgccaaggagctgatcgcgtttcttatgctccacccagattacgcaaatgacgacatcctgatctgtgacccggagggagaatttggcgcactcgtcaaagccctgggccgggagaaagcgacggtggcccatctggtggcaggcggcaaggaccgcctcaacgccatgtatatggtggagggctacggtgagcaaaaccccatcgtggaaaagagccagtttgtcatgtccctcatcgagcagatcgacaagcgcggcgtggggccgcagcataaatccatcatcgaccgctgcaccgccctggtgtacccggaggcggagaatgccgggagggtggctaccctctgcgacctgcgtcaaaaactgctggagcagccggaggataaggccagggagatcgccctttccctggagctttacaccaccggttccctggacatctttggccgggaaagcacggtggatttgaacaagccctatgtggtgttcgacatccacggcctgggcgagcagctaaagcctgccggttccctggtcatcaccgatacgatcctcaaccgcgtcaccctcaactggaaacggggcaagcgcacccatgtgttcatcgacgagttccatgtgatgtttgagaatgagcaaagcggcattttctttaattccgcatggaggcagtttagaaagcgtggggcctacccgactgctatcacccagaacgtggagtaccttttggattccgtccaggccagcaccatgctctctaactcggagtttatcgtcatgctgaaccaggcggcgtccgaccgggcaaagctggcgaagctcctcaatatctccaacgagcagatgagctatgtcaccaatgcggacgctggctgcggcctcatccggtatggcagcgccctggtgccgttcatcaaccgattcccccgtgacaccaagctctatgccctgatgacgaccaagcccggtgaaggcgtattcggcggcgaggaggtgccggtatgagcaatcttcgctttgcgtccccggaacaccgggatttctttttggatatgatgagcgaggctcggaggaacgactgttaccaccgggcctttttctatgtgatggggattgccccggaaacgcggtcaaacatccgccagatgtttgacttcaagcaggactgtatcgagccggatggtatgcacggcggctggcagaccagcggcaccgtccgggtgtgccgccttgcttttaatctctggaacggctataccgacccggagcacagcaacgcctattccccggaggatttgttctgctgcgagttcgccccctactttatggaaggcgtgaaaatccgttacccgaaatactgccgggagctgccccctgtaagaaagcaggcggaaccggcgcgatgatacgtttgagaatggaggaatgaacaatggctgaaccggctcttacgttgcgggaccacccgcagatcatagacctgatttccgttctggaacagagcgggcttcaaaagcagaaggaagaagtacaggccctggtgggctatatcgacggtatggaagaaaagctgtcccagatgatggacgaaatgaaggaaatgcgcctggaggtgggcaagctccacgacaagggaatccgcgcacggtgctcccagcttgcggacactgtggagggtaaagtccgccagaccaaagtgatggtttccacggcaaaggaaaacctcatttcatctgcaaagcagatggtgcagaccttccgggaaaaagggcgctctgccctgtgccatgcggcccaggccctgcacatcccctcagttctttcccggatgggacggggctttgcccattcggaaaaaagcatggggcaactcgctgtgagactggactccatgcgggaagaattgcaccaggcgggtggccacatcaaaaacgccgggcttgcccttacgggaaaggaaccccaggaaagcaaggaattatctgcggataagggtgtgcttgccaagctgcggagctttgtgctgtcttgcggcaaggtgttttcggaaatggaacgcgacatggcgctcacggtggagcgaatcaatggcgggcgctcatcggtgaaaaccgaactgcaggggttgagatcggcccaggccgggcagcgccgccaagcggccagcaaggaacaggcacgataagtacaggagggtgaaatatgagtgacaaagtgaaaagcagactgatgatcgctggggcggccttttgtgccgccctgttccttttctccggggctatgttggcccgcgaatatctggaccaaaagcaaagcgccgaagcctttgacgaggtggccgggctggtcaaggaagatgtggagttgcccgcgctggagctggccgatgacccggcccaggagccggaagaactcacggcttttgaaaagtatgcggatgtgtacgccaagaacagcgatttggtgggctggatttctattcccggcacccggattgattatcccgtcatgcagaccaaggataaccccaacttctatctgaagcacgcttttgataagtcgtacagcagctatggggtgccctatatgcaggaaaactgcgacgtcggcatttccgacaatctgatgctgtacggccatcacatgaacaacggcagtatgttctccgatctgtgcaagtacgagagtgaggatttctaccaggaccacaagaccattcattttgatacgctggacagctttggcgagtatgaggtaatcgccgcatttaagacggtggcctactcagagcaaggcttcaagtattaccacttcgtccgggccgaacaggaagaagattttgacgagtttattgccaagtgcaaggaactggcgctctatgacacgggcgtgactgcggaatacggcgaccagctcattaccctttccacctgcgagtattcccgaaccaacgggcggatggtggttgtcgccaagctgctggaggaataagggcggccccgcccggggaaggaggtgaagcccatgggcaagggtataaaaacaagagtttctgcgaaaaaaggcattaaagcgattgataaagcggcggttgcttctgaacggatgaaggaggcatatatccgcaccaaggataaggccgaccacagcctgtatgcggaggaaagctctcctggtgaatatgcgtccgaccgcctttccgctggggtggataacgtcacccatgaagcggttcaccagtttgataaacagggccgcagaggggttcagacgactaaggagaatatctcccagctcaaggagaaaatccaaaagcggaaagccgcagccgaacagctgaaaaaacaagcggagaaacaggcggctcagcaggctgggcagcccgccacacgctggagtggccgtcaggcagccgatacggtttccgagccggccaaggcggtccgtcaggagcgcggggccatcaagaccctggaccgcggcaagaaaggcattaagacagtggacaggggccgaaaaaacatcaagcaggcttcttccacggccaagggaaccataaaaaccaccagcaaatccattaagacggcggaaaagactgccaaggccagtatcaagaccagccaacaggcggctaaagctgcccagcggactgcccaggccacggcgcgggcggccagggctgcagctcatgccgcccgcatagcggctcgaactgcggtagttgcggcaaaggcagcggtcaaggctacggttgcggcggtgaaagccatcattgcagccaccaaggcgctgattgccgccatcgctgccgggggctggatcgccgtgctggtaattattgtaatctgcctcatcggtatgattatcggctcctgctttgggattttcttttccggcgaggattccggcaccgggcagaccatgcagactgctgtacaggagatcaatacagattaccaggagaacctggatgagatcaagacgtcccacagctatgatgtgttggagatgtccggttcccgcgctgtgtggaaagaggtattggcggtttacgccgtcaaaaccaccaccgattcggacaacgcccaggaagtggccaccatggatgatgagaagctagagctgttaaaggacatcttctggcagatgaatgagatctcgtccagcacgtccacccagacggaaacagtgattgaaacatccgatgacggcaacggcaatatcgtggaaacggaaaccacggtcacgcaaacctatctgtatatcactgtcagccacaagactgcggaggaaatggccaaccagttcggctttaacgaggaccagcgggaacagatggcggaacttttagccgatgagaacaattccctttggtcccaggtgctttacggcattaccggaggggatggcgaaatcgtcacggtggcgctctcccaggtgggcaatgttggcggcgaaccgtactggagctggtacggctttggcagtcgtgtggaatggtgcgcctgctttgtaagctggtgcgccaatgagtgcggttatatcgaagccggcgtgatcccgaagtttgcggcctgcgcgtcccagggtgttccctggttccaggagcgtgggctgtggcaggataacagctatgagccgcgccccggcgacatcatcttttttgactgggatgatggaggccaagacggttcttccgaccatgtggggattgtggagaaggtggagaatggccgcgtctacaccgtggagggcaactctggcgactccgtgcgacagaacagctatcccgtgggatactatgagatttacgggtatggcacacctgcctgttaacagctccaaaaaagaagaagcccagccgcacaggcggctgggtacataatgataataacaaaagcatcgtccccttgacagcaagacaaaaatatgctattctgattttggtttgataattagattatcttaaataaagcgattatcagagaagggagaaaatattttgagttactgttccgacttgacaagagagcgaattatggaatgtgcgaaagtggaattcctaaaaaaaggctttcaggcaacgcagcttaaagatattgttaccgctgcaaaggttacaacaggtgcaatatatcgacattttaaggataaagaagcgttgttttttgccttaatcgaagatgtttaccattatacattagattttctggataatgcagaaccttacgataaagttggaattagagaagctattgaaagggattctgttgaagcgtcatatgttcaggcaatgacatatgtcaactatatgtacgagcatttggaggaatttcaactcttgctgaaatgcagcaaaggttctcgcgtcgaaaactttatagaagaaattacaattcaatatacgaaacagaatgccctatttgtaaaggcggcatatgaagcgggatatgcgaaatgtctgccaaacgatatagaaatacacattttgacgcatggatatattactgcactatgtgagtgtgttttgcacgatgttccttataaaaaggcggaggattatgtaaaaaatatcataaaattccagcactatggctggtatggtgtattagggcttccactaaaataagtggcttttgccatttattttttgccaaataattagttttcgctaacctatttaaggaggatttttcatgaagaaaaaaacgaaacctggagcaattcagcaattgttgagttatgcaggaaataataaaaagcaactatatctttcaacctttcttgcaacgctgggcgaactattcgggatggccccctttattacagtgtcattattagtcgcggaactatttaacaaaacagctactattcaaaatgtatgtatcttgtttgcagtcgctttgggcgggcaaatattaaaactgtggcttacatatcaatcctcttttatgtcgcataaggctacatataaaatattgaaaaatatccgtagcaaaatcgcagataaaatgcttcgggttccaatgggcgtcatgttggatacgccgaccggaaatttcaaaaatttgatggcagatacagtttcaaaattagaggattcgatggctcattttatgcctgaaataacctctaatgtagtggctcccctatgctgtatactactggtatttattcttgactggcgcatgggattagctgcattgattacaattcccctcggacttttgggttacattggaatgatgaacgattatgtgaataaaagtaccacttatatgaaatcacaaaatgcgatgaacagtacgctggttgagtatgtaaatggtatagaggttattaaggcatttaatcaaggaagtgcttcttatagtaaatttacaggtgcaattaacttcttccatgacagtactctggcatggtggaagcagagttggctttggtcagcagtcattcaggctgtaatgccgacaacattgttgggaacgcttccgattggcgcatggctttatatgactggaacattaccattatcagattttatcacttgcattatccttcctattggatttattgccccgcttatgcgagtaggaaaatattctgaacaatttaatatggtgaaagcctgcctcgatcaaatacgggattttattgaaaaaccggaactgaaacgtccagaaaaaaatgttgcactggatgaaacagcctatcgctttgaaaatgtttctttcgcttataacgagacggaagttctgaagaatgtatcctttgaaatcaaaccaggtactgtttcagcaattgtcggcccttccggttccggaaaatcaacgattgcaaaactcatggctggtttttgggacgccacaaaaggaaaagttatttttggcggaaagaatattaaagagattcctttcgcacagttgatgggtgaagtcagttatgttgcacaggacaattttctgttcgatgaaagtatccgtgaaaacatccggctcggaaaaccggatgcgacagacgatgaggtggtagctgctgcaaaagctgcctgctgtcatgagtttattgtaaagttggaaaacggatatgatacaaatgccggagacgcaggaggaaaactttctggcggagaacgtcagcgaattactatcgcaagggcaattctaaaaaatgcaagagtaattattcttgatgaggccacggcctatgctgatccagaaaatgagtatctcattcaaaacgctatcagtaaacttgtaaaaggaaaaaccctcatcgtagtagctcatcgtcttgcgaccatccagaaggctgatcaaatccttgtggtggaaaatggaaagattgttggctgcggcaggcaggaagagcttttatcagaatgcccactttatcaaagattatggagtgattatgtgagttcagctgatcaagtggaaggagggacattttaatatgttttcaattataaaaaggattttacggttatctgggaaatatcgtccccgtgtaattgccggactgatcttcaatgctctgaaatcctgctgcgccgcctttgtattttttgctgtgctattggtaatgttgaatatcgaacacttaacagagactgtcattttacaggcatttggaattgttgcacttagtgttttgggccgctttttgtttcagtacctaagcgatgtgctaatgagtgcgtctggatatgagattttccgggaaaagcgtcttgagattggaaatcagctcaaaagggcaccaatgggctattttacagaaaataatctcggcaccgtacaaacagtattgacaacaacaatttccgatctggaagggaattgtatgcttgcactaacatttttggtaggaggttttgtacaggcgcttgccatgacgctaatgttgggtatattttgctggcagattgggtttttggctttaacaggaattttagcgggaattcttgtactgggccagataaaaaagcgggccggcgcgcatacggaagatatgcaaaatgctcaggaattgttggtgggaagtgcattagaatacataaaaggcatttctgttctgcgcatattcggaaaaggcaaagaaggaaaaggaaaagtggatcaagcctttgaaaataagtgtcgcagcgatatagcggttacaatttctactgccggaattatgaagctgtatgaagccgtatttaagattacaagttgcctgttatttttattgtcagctttgctctatttgtggggagttatcacattgccctattgccttttatttatcatctgtgcatttttaatgttcatggaattggaattgatgaatgacggggcctttttgagtaaaatgctcgctacgcagttggatcggctggatttcatctcagatataccggttttagatggagacggaaaggatattgtcctgaaatcatatgagattgaactgaaagatgttattttcgcttatgacagccgtccggttttagatggaatcaccttgaaaatcccacagaactctacttgtgctatcgttgggccgtcaggttcagggaaaacaactttgtgtaatatgattgcaagattttgggacgtaaattctggaagtgttaaaattggaggacacgatgtaaaagaatttacttgtgatagccttttatcatatgtaagtatggtattccaaaaggtgtatctgtttaatgatacgattgaaaataacatcaaattcggaaaacctaacgcgacccatgcggaggtggtagaggccgctaaaagggcccgctgccatgattttatagaggcgctcccacaaggctatgaaacaatgataggagaagcaggttccactttgtctgggggagaaaaacagagaatttcaatagcaagggcgatattgaaagacgcgcccatcgttattttggatgaagcgacatccagcgtagacccggaaaatgaaaaagctcttttggacgcaatttttgaattgacgaaaaataaaacactaatttctatcgctcacaggttgtctactgttcggacggcagatcaaattattgtcattgatcaaggccatattgttcaaaagggaacccataaggaattagcagaaaaagaagggatttatcgtacttttttgaagtgcagggagaaatccatcagttggaagctatgaggtgtgttgccatgaaaaaacaatttccaattatatcttttgaacatgcctcttttcagtatgaaggacagtctcaggaaagtctaaaggatgtaaagcttatcataaaatcgggagaatttcttgttattactgggcagagcggatgtggaaagaccacattaaccaggtgtatcaataatttgattccccgcttttttgaaggcagattatccggcgaagtcattgtattgggacgttccataaaagaatcggacgccggtgaggctggcaaagagattgcttcaatttttcaagatccccgcagtcaattttttactacaaacagttccagcgaagttgcatttgcctgcgaaaactatggaattccacataaagaaatcgttaaacgtgttaacagcgcctttcagtcactgaatatggagaacctaaaagacagagatatttttgccctgtccagtggagaaaggcaaaaagttgcttttctcgcagcgactactcttaatccacaaatttatgttctggatgagccttcggctaatttagacattcatacaatcttacaggtaagagagattctttctgctttgaaagccgctggacacacgattattgtttcagaacacagattgttttacttatacggactcgcagatcgctttttaattatggaggatggtcaaatctgcgaagaattaacaggtgaggaaatggcagaattatctgctgtccaaatgcacaacagaaggcttcgcccgttaaatttggatttaatacaaatagaaaggaaagaatctatttgccgctcggaagtatttctccaaattagaaatttgagcttttcgcataaagccatgccggaacttcttcacaacatttcattagaagcctacaaaggcgaaacgattgccttgattggagaaaatggttgcgggaaaacaacattggggaaaatcttgtctggcttgattcgctgccgccaaggtgcgttttacattgatggaaagaatgtgaagcaacaaaaattatccgactatgtgtactttgttatgcaggaggcagatcaccagctttatacagacagtgtgacggaggaattgaggttaggaaacaaaaggattccaagcatagatgaaaaagtgtctcaaattttgaaaatgctccatctggaaaacttcaaagactgccatccgtatgctttatcaggcggtcaaaaacagagactgacaataggagcggcaatgctttcggaaaaaccaatcatcgttttggatgaaccaacaagcgggttagactgggataatatgtgcgctgttgccaatgctgttaattatatgcgtgaggctggaaagctggtctttattattacgcatgatctggagtttatcagcctgaccgcctcgcgcgctttgcttttgaaggaagggattattaaagatgatttacaaatgacggaacaaaacaatttcaaaatcgtaaagaattttatggtggaggaaggtggtgaataaattgagaaagcatggagtatattacgattctcgcataaaacttctgttgattctattgacatcagctttggcgtttgctttgggtggaggcttaacaggcttgttactctttggcgtcgtttgcctgtttgctttgctaagtggactttggaaaacaagtatcaaagttgcaatagtttatatagttctgcttatgttggcgcaagtccttccaattcatttatcttccgtgataacattctttttactaagaattttgactattgcacttgctttgaatattctatttcagactacggaaatatcggaattgatagcagcgcttcaggcaagtcatatccctcaagcaattgtgataccagtggctatcatattgagatttcttccatctttgaaacaagatgtgctttatataaaacaagggatgaaaacgaggggcgtgggattgtctttttggagaatagtaagtcatccggcgcagacatacgaaggctttttagtccctatacttatgcgccttctgatgacggcgacagaattatccgcatcagcggaaacgcgaggcatcagctatccttgtgaaaaaactcactatatattagttgatttccgcttaagagatagtattttgttgataggtatgcttgctctttttgcggttatcatatggacatcgttccaaccaatatcattttaaggaggatttatttcatgcaaaccgaaaacaaaaaaggatttcaagtaaaggatttgatcgtcacagctcttttatctttgtgcgcacttgttatctatatcatttgtgcgttcctatctttttctccctacacgatgttagtggtaagtccattgtggtcattattggcagctattacatatttccttgtagcagctaagactaagaaaccgtgggcactgttcattttttgtgcggtaacaggcatttatggattttatccgcccatgataatttgctgcattattgctggcattatttctgcgttgatcgcgtggaaaacaggttgcactaatggaaaaacacttacgttcagttatatcatttatatggttttagcagcattcagtggtacatatattcccttcttgtttttctcaaatcaaacacttgagcagtatgcgggaatgtttggcgaaagttatttgggaattttgcaaacgttagtatcacctgtaacagctatcataatgcttgtcgttgttgcaatttgcgcctttgttggcgcgctcatcgctaagaaactgctcaagaagcatttcaaaaaagcaggtatggtgtaaatgaagtaattatatgtgtcagaaggaggtgtaccattatgcccttaacatcatctatggaggactatttagaggcagttttaatagtagctaaaaaacaaattgaggtgcgctctgttgatatagctcgacaattaaatgttagcaaaccaagcgtctggcgggcaatgactgtcctaaaagatggtggtttccttacaatggatgatcacagttttcttttactcacagatttaggacaagaaacagccaagaaaatctatgagcgtcactgtttttttactgaacagcttatcgccgcaggtattgaccccaagactgcggaggccgacgcctgccggattgaacacaacatcagcgacgaaagtttctcacggctgaaagagacagcaacacagaaacaagattaacctggataaatttttaatggctaacttatgggaggaaaaatgaagattaaatagaaaagacacgccgacgggcttgcagagtagcaagtcctcagccatgtcttggaaacaagagaatggaggtggttcccatgcagcaaacagaatgggtttattgtcccgtctgcgggaataaaacccgtgatcgaatcagggaggatacggttttaatcaattatcctctctactgcccgaagtgcaaacgaaagagcttgattcaggcgaaacagctacacatcgttgtcatcaaagagccagacgcatagacgcagagccgatgaacccgtgagaatttcccacggacatcggctctttttcactctttgggctggctatccaaggccgctctaactgtcgccttgatgatctgcatagaacgctcatcgcagttatacagcatacggacaaggctttccatttcagaatcctcaatcttcttttccgggaagaaaatctgatcgggtaaaatggacagctcccgaatcagcttgtacaggatgtcgtagctgggctttttgccttcgttctcgatacgatatataaatctctcgcctactccgaccttggctgccagatcttcgaccgtaatatctgctttcatgcgggcattcttgatgatctcgccaagcatttcatgttcattctgcactttcagttcacctctccttctattttacggatttatgccagatttataatggcatagcagttcaaattttagagaactgatagtgcggataaaagtgaactgaccaggatcgtataactggccctgtcaataaaaaaaacgaggctttggcaggttggtttgtcatgcccatccctccagaccacgttttggcctggagggatatttcatgcgttggtcatccttcgcaccgctgcttattagaagcagcgagtatgattctatgtcgtaggccgcctgcttgacggtgtacggtcaaaaaaacttcccgtttttcagcgggatactatgcccttcgcactgaaccatcatgccatgatttatacgaactaaaaagaaacgcacttgctgtttgggggaataccccattctgcaggtgcgtttttcaatatagagaaaccccattttcacgttgtaggggaccgccggccagtctgaatttctcgcaattcagactgatcggagggaaaacagcgtggacgctgataaaaaaagaatatggattcgcggccaatttgtcgaggtcacggatgaagtgtaccgggcctatatgcagggcgaccggaaaatgcgctattttgagaacgatttgaaaaccgagcggttcgttctcggaaaggagggccaagtggtgcagatcatccccagccgcgaagattctttggaccggctggtggatgaaaatgcccggcaattctccgatgagcaggaaagcgtggagagcgtggtgctccacaagctggaagtggacaggctacataccgcgctttccctgcttaccccagaagaacgtgcgctgatccaggcattattctttgatgagcgcaaggagagcgagctggcggtggaactcggcatttctcagcccgccgtttataagaggaaaatgaaaatcctcaaaaagctaaaaatttttctggaaaaataagttttagcggttatagaacctctcacccaacggcaaatagggtgagaggttctttttatggcctcatggcaccttgaaaactgcatacccattcatcaggcacattcccgctgctttggcgaaagccaaagcccaggtagcggctgcgcagtgatctgccgggagaaaacaacgagacaccaccgaaaaaagagattgtaggtctttggtttgttcttccaggcaaggagcgagaaacagcaggctgccagtaccgggcggctcccggtacggccataaccagcagcggggacaatgatactcccgtccagcctaacgtccgagcgttgaagcggtttgccgccgtgatccgtcgcaggcaatgggggcggttgcgtgagaaccacgcgaggggtgagattccccgtggagctggtgagccgccagccgtttgatgacttcccgcagtgttccggggtgtcgaggacaaataggaacactttgaaatacgggccgtacagcaggacgggccaatgaaaacaggaggattgttttatctctccctggccttcattctgttctgctgtccggctctacataggcggcacctgccgcctgcatttcaaagggaggtcatagacatgaataagacatatctgcgcggcgatatgtactatgccgatctgggccggggaatcggctccgaacaggaagggtatcgccctgtccttattattcagaacgatactggaaacaagcacagccccacggtcattgtggcagccatatccagcaaagtggacgccaaggccaagctgcccactcattaccttctcaaagcagagaacggcctggagctgccttctctggtgctgatggagcagctccgcaccattgataaaagacggctggaaacgtacatcggacatctggaggaacagcatatccgccggctcaaccgcgctctggcagtcagcgtgggattgattgaagaaacgtcgaaaaatttaatcatgtgcctttgtccggcctgtgccaataacttctacggcacaggctcttattatttgcgccgggtccaccctggccgggtggaaaaggacatctgcacctactgcggccagcggcccggttttgattatgaagtagtaaaaaagaaggaaaggaagtgaagattggatatggaaaagctgattactcgtaaggaggcggcaaaactgttgggaatcagccttgccaccttggatgaagccagaaacagcggtttgatttcctatattcaatatgtaccgaatgggtgcgtatatttcacttctgcctaccttcaggaatatgttgctaaatgcacctatcgggcaaaacctgtggaaaagaaagcaacctaccgaaatgtgcgaggaaacaaatcgcacctttgagcaaatcgtgcggttttggtaaaacaaagatacaacaccgattgcatttggaggtagaaaaatggcagcaaaaagaaaacgaattcccaggtacagcaaagtccagataaatgggcatgagtattacaaaacagatattgaggacgcagatggcaaacgggtgattctttacggaaaaacccgcgaggaagtttacgacaaggaaatggcggctcttgagcaaatcgacaacgccacattccggcgtaaatcccccacggtcgccgagtattgtgaaaagtggcttctgatgcagtccgtccatatccgtgccaccacattgattgattatacatccaaggtgcggcggcatattatcaaggagctgggtgagaaacgaatggccgatgtaaccctggatgacatccaggttgcccttgtgccagtctctaaaaagtcggcttcagtatataagtccgtggtaatcctctacaagtctattttccgggcggccaaggagagccatgtgattgatacaaacccgacgatataccttgaggcaaaaggcggaggcgttccgcaggaggagcggcaggctttgacggatgaacaggtagaacggcttttggacgccattcgtgggttgccgccctatgtatttgtgatgattggcctgtatgccgggctgcggcgggaagaaatccttgcactgcaatgggattcggtatatctggatacagatgcgccgtatttgacggtccggcgggcgtggcacacggaacataataggccggtcattctcacagagttaaaaacgaaggctgcggagcggaatatccctctcccggatcgtttggcagagtgcttgaaagcggcaaagaaaaaatcgacatcagactatgtaattgccaaccaggatggagagccgttgtcttatacgcagtttaagcggctttggcagtatatcgtgacacggacagcaaaaccgaggatagctcgcaaacttgtggacgggaaatatgtgaagtatatgctttacccgaagctgggtgaaaaagcacggaacaatggtcatgtggtatatagcttggattttgaggttacgccacacatgcttcgtcatacctacatcacaaatttgattcatgcttcggtagacccgaaaacagttcaatacttggctggccatgagagcagtaagatcacgatggacatttatgcgaaggtaaagtacaacaagccggagcaactggcaggagttttaagcggagcctttgcagaatgggatggcggtgaatacgaagcggcacaataatttgacggaaaacgtacaaagggcggggagtgttccccgccctttgcgtttcccagaatcgcacctttgatagagccatgatttttcagtataaagaaggtatcggcgctgaaatacatattaaatagaaaggaactgaaatcatggcgaaaaaacaagaaaatgttccccggtatggcactgccatgcggagggggattcaatattacaggactcggatcaccgatgccgatggaaaaagggtggacttgtatgctgaaacctgcgaggaactccagttaaaggagatggaggctcgacgccaggtagaggaggcggttttccgcagaaaacatccaacggtggcagagtattgcgagaagtggttgctcatgcagtcggcaaaggtatcttccggcacgttgagaggatatacccagaccatgaacaactatattgtcaaacctttaggcgatatgtatcttgaggatgtgactgcagacgatattcggcttgcgatgattccattggcttcaaaatctgctggattgtatagtaaggtaaatatgctcctgaaatgtgtcttttattcggcagagcgaagccagttacttgaatataatccctgtgagggactctcggccaaagggggaaaaccggggaaaaagataaatgccttgacggatgagcaagtgaagctacttttagatactgtccgagggcttccgccctatacctttataatgatcgctttatattccggcctgcgtcgtgaagaaattctgggactgcaatgggactgcgtatttctggatgttcctacgccgtacatctctgtacggagggcatggcgctcagaacataacaggccggtgatttccacaacgctgaaaacgaaggcggctcggagagatattccgatcccaaagtgtttgacagactgcctgcgggaagtgaaagagaaaaccgaatcggaatatgtggttgctgacagaaatggaaatcctctttcatcttcgcagtttcagcgggtatggaaatatgtaaccgttcgctctacgaaaccccataactattataagtatgtaaatggccagtgcgtgaagtgtacggtaacgcctacccctggcagtcatcagaaaaataacccgaagttagtgtatgccattgactttgatgtaaccccacatcaacttcgtcacacctatattactaacctgctgtatgcaggcattgacccaaaaactgttcaatatcttgccgggcatgaaaacagtaagacgactatggacatttacgcgcaggtgaagtataataaaccggaggaacttctgagtgttgtaaatgctgcatttgctccatctgttggtgtctaaaatgcccccatttttatgattaaatactggggcaacatttgagggcagaggccaaaaagcccataaaatcaaggaaaaccggcgctaaactgtacgccaatacggtctcaaagcagctcgtcgcgctccgcagttctccaagagataatcatccgcaaggatttttctcgagggacgcaaaagcgaatctttcaaacatttccccgcagacaaggcatacgccgtatgccccgcctgcgggtttttgttttaaaacaagcatcacccccgctccgcaaaatgaacagaaccagtaaaacaggacaatagacaaaatcccccctgatgtaggataataagtacatcaggggggattcattatgagcaaacgaagatacaccaatatgcaggttctactaccgaccatagaaaagatgttagaatcagggaagaaccacagggaaatcgaagcggaacttggcttggagggagaccgtccggttcacaatctgctgaagcggcaacgcaaaaaagccgccaagggtgcgccgaagtttcgtggcaggaagcctgcaaagacgctgcaggaatataagtatgagaataagcggctcaagatggaagtgaaattactgcaggattttctgcagtccacagaaaggaagtgaggccaaaggcaaagtacgccgtcattcaccgtcaccggggagaatacccaatatctgttatgtgcaaattcttcggggtatccagaagtggttactactgctttaaaaagcgtctgggagagacggatcgcgatgctgttgtggcaaaggaaatcgaggaatgtcagcgcaggacagataagacctatggctatcgacgtgtatggaagtggttaaaaggcagaaatattcaaagagatccgaagactgtgctcagaatcatgaaaaaatatggattattgtctgaggttcgccgacgccgccaatgggtaaatcttggtcagcaggtacacaaatacgaaaatctgttgaacagacagttccgggcggtcaggccaaacgagaaatgggtcacggacatttcttacatccacacaaaagaaggcattttatatctgtccatgatccgagatctgtatgacaacagtattgtggcctacaagactgcaagtcggcagactgtgaatcttgttctggacacgattcgtctggcaatgaagaaagagaaagtcgctgcggagttgcagctccacagcgaccaaggctttcaatacacatcgcaagcatacttcaagctaacacaatcttacggcataacgccgtccatgtcaaggaaaggaaatccttatgacaatgccatggcagaaaatttcttctccattctgaaaacagagtgcatctaccgccacaagccaaagacgttccaagaagcaaacgaactgatcgacaggtatatttacttctataaccacgaacgcatccaaacaaaaacgggagtggcaccgctgtcgctgcgccactccgcttaaaactcaatatcctacatgggggcttttagtgctgtccgcataatctggtgcggttcaaaaaacggaacgggggtgatgctatttataatctgttttactctgcaatttctgcactcagcaggtctaaaatcgcgtcttccgcgttccagaagtacgcgttttcactgagaagcgccgtgatgcccgtgcggtcaaaataggtgcgcacgccgtctgccatgccacagcaggcgaccgttttgccttgcttttgcaggctttcacacagctccaaaacggcctgcgcgccggaaacgtcaatgttcggcatgccgcgcagggaaaagatcacatggtcgtaggcgggcatttccgccatgcggcggttgaattcatccaccgcgccgaagaacagcgagcctatcacgtacacaacgccggtcgtctccagcaccggcggcttgccttccaccgtgcgcagcttattcgcgtcaatgtcggagaagcttacgccaatccggctggattttgcaatgtacaaaaccgcagagtacgcaacaccgagcaaaatcgcgaccgtcaaatcgaaaatgaccgttgcgagcatcgtgatgaggaattggctgatgccggattttagcttgtggctgaaaatgtagcggatgccgctccagtcgttcatgcgccacgccgttaccatcaaaacgccggcaagtgccgcaagcggcaggcgcgccatcacgccgccgagcagaaacatggaggcgagcaggaaaacggagtggaacacgctcgcaaggcgcgtctgctggccggatttcaccgctacgctcgtgcgcgcaatggccgccgtagccggcacaccgccgaaaagcggcagcagcatgttgcctacgccctgcgcgatgagctcttgatcggcgttgaacggctcgtttttcatgcgggaagccgaagcaccgcacaaaagactttcaatcatgccgagcgccgcaatcgtcacaacgggagagatgaggtttttcagcatgtcaaggttcagaccgccgaggtcaaggcggtctgcgagcatcagcgtgcgcggaatgtcgcccaccgtcgcaatggaatccatacggaacagggcggaaacgaccgttgccaaaatgatgcccacaagcgagcccggcacgcgtgcgccccactttttcggccagacaatcatcacgacaacgacaagcagaccaatcagcaccgcttggaggttcggatgaaagccgaggcgcgcgtaagacgcgatttttgccaaatttgagctgccctcggacgcagtgccgaagaaattatcgatttgccccatcgcgataataatcgcaatgccggacgtaaagcccatgatgacgggcatcgggatgaagctgatgagccgcccaagcttaaaaataccggctaaaagcagcagtgcgcccgccgcaaagcacgcgaaaaacacgccctgcaagccgtaagacgccacaatgcccaccaaaacggcgctcatcgcgcctgtggggccggaaatctggaacgaagcgccgccgagtaccgcaatgacaacgcccgcaatgattgccgtaacaagacccgcagctgccgtagcgccggaagatacgccgaacgccagcgcaaggggcagcgccaccgcgcaaacagtcaggcccgccatgatgtctttcatcagcttggcggtgttgtagcccgaaaactcctgcttcaggctcgttaaatagttttttatcatgtttccctccaataaattgatttttccgcatcatttgccgcttttttaccgcagcctattaactataccattaggagccgctttaatgcaaggaaaaagatacgccgttttctcgcgcttttctgtgcatacagcccgcgtgacacaccttataaaaatctttactttttataggaaatacgctatactttgtacaaaagcaaatgcgaaaattccttgttttaatccaaacaaagaggtatgaaaatgaacgtaaaaaaaacggaaagagacggcattgtccgcgcctatcccgaaaacggcaagccgctcgcgtggtctgcgtcgtccggtgtagagctcatcgaaagagacggcctgtattttaaagacttggagaagaccggcgagcttctcccgtatgaagattggcgtttgcccgttgaggagcgcgccgcagaccttgcttcccgcctaacaacagaggagattgcgggccttatgctctattcgccgcaccaagcggtgccgcccatggcgttcggcccgttcggcggtacatataacggccaaaagtacgcggaagcaaatgtccctgcgtatacgctcaccgaccagcagaaggaattcatgaacaaagagcacattcgccacgtcctcatgattacggtagaagacgcgaagactgccgcaaagtggaacaatgagctgcaaaagcttgccgaaagcatgccgcacggcatcccggtgaacatttcctccgacccgcgcaacggtgcgcgcggcagcggcagcgtagagtttaaaaccgccggcagtgacgtcagcaagtggccggagggtgtcggttttgccgcgtgctttgaccccgagattgtccgccggttcgcggaggatgcgtcgaaagaataccgtgcgctcggcatcaccacggcgctcggcccgcagattgacctttgcaccgagccgcgctggatgcgctttgtcgatacgctcggtgaaaatcttgagatgacaaagaaaatggtcaaggcgtactgcgacggtatgcagaccaccgagaattccgaaaacggctggggatatgacagcgtaaacaccatggtcaagcactggccgggcggcggcacgggtgaggccggccgcgatgcacactatgcctacggcaaatacgcggtttacccgggcaataattccgaagaacacaggaaaccgtttacggaagcggcgtttaaattagacggtcccaccgaaagtgcctctgccgtcatgccgtactacacggtttcttggggactcgacaccaaaaacggcaaaaacgtcggcaactcgtacagcgagtatctcatcaaagatctcctgcgcgaaaaatacggctttaagggtgtcgtttgcacggactggggcatcacgcaggatcccgcacccattatggatacgtttgcaagccgctgctttaatatggaaaacatgaccgagggcgagcgctgcttcgtcgccatcatgaacggcgtagaccagttcggcggcaacgcagagattgcgcccatcatggaagcgtatcaaatcggctgcgaaaaggtcggcgaagaagccatgcgcgccagaatggagcgctccgccgcgcgtctgctcaaaaatattttccggtgcggcctgttcgagaacccgtatctcgatcccgaagagtccgctaagattgtcggcaacgcggaattctgcgcccacggctatgacgcacaacgcaaatctgtcgtcttattaaagaatcgcaatcactgtctgccgctccaaaagggtatcaaaatctacgtgccgcagcgcaagctccgcaccatgaagggcttcatgcgcaacgatattcccgcccacacggaagaccccgtgacggacgaggtgatttcgaaatacggcgtgcgcgtccatacgcccgaggaagcggacgtggcgcttgtctttgtggaaagccctgcgtgcaacgcgtattctacggaagacgtcgcaaacggcggcaacggctacctgcccatcacactccagtaccgcccctatacggcggtgaacgcgcgcgaagtgagtattgcgggcggcgatttccgcgaggatttcacgaaccgcagttaccgcggcaaaacgaatattgcctataatgaatgcgacctcgataacattctaaactgtcgcgaggcgatgggagacaagcccgtcattgtctgcgcagcaatcaacaacccaatggtcatgcacgagtttgagcgtgaagcggacggcatcgtcgtcgagttcggtgtttcccgcgccgcggtgcttgacgtcgtcttcggcgattacgatcccaccggccgtctgcctgtgcagatgccgaaggacatggacaccgtggaaaagcattgcgaagacgttccgtttgaccttgaagtgcacgtggatgaattcggccacgcctacgactacggcttcggcatgaattatgaaggcgtcatcgagaaataaggagtgacatctaatgaatacagtagaaaaatgggggctttttgaagtttccctcaaaggtccgtctgcgggcaacccgtttacggagcagtccgtttccgccacgttccgcagcaaaaacgagatcgtcacggtagacggcttctatgacggcgacggcgtttataaagtgcgcttcatgccctcgtttacgggcgattacgtctatgaaacggtcggcagcttcccggaagcggagtctgccggcgatttcaccgtaacggagccgaccggcaataaccacggcccggtgcgtattgcgaacacgtaccatttcgcctatgaagacaccacgccatactattccgtcggcaccacgtgctacgcgtgggcgcaccaaccggaagaagtgcacaagcaaacgctcgaggagctcgataagggctacttcaacaaaatgcgtttctgcgtctttccgaagcactacatccacaatttccgcgacccggagaccttcccatatgagggcaccccggtcgataattcaaacctcaccgaagaaaacttctcgtatttcgtcgatttttccggcaacaactgggattttacgcgttttaaccccgagcattttcgccgcatggagcgctgcatcgtagaattacaggagcgcggcatcgaggccgacatcatcgttatgcacccctacgaccgctggggcttctccgtcatgaaccgcgagcaggacgacctctactggaactacgtcatcgcgcgcttctccgcctaccgcaacgtgtggtggagccttgcaaacgaatacgacctcatgcgcgccaagaagcttgaggactgggagcactacgcagacctgctctgcaaaaaagatccgtacaaccacatgcgttccatccacaactgcataccgttctacgaccacactcgtccgtggattacgcattgcagcttgcagcgccaggatctctaccgtcacgtggaatacaccaccgattaccgcacgcgctaccaaaagcctatcgtgtgggatgagattgcctacgaaggcaatattgatatgggctggggcaatatctccgggcaggagcttacccgccgcttctgggaagcttccatgcgcggcggctacgcaggccacggcgagaccttcatgaaccccgaagacatcttgtggtggagccacggcggcaagctgcacggcgaaagccccgcgcgcatccgcttcctgcatgaaattctcacgcagacgcccggtctcggcttaaagcaaggccccggcgcgttcgatgagaccgtcgccgtgccggacgagatgatccccgtcaccggctacgagattcactactacggcttcggccgcccgagcttccgcgatttcgtaaagcccgcggacgaaaactggcgcgtggaggtcatcgatacgtggaacatgaccatcaccgatgccggcgtgcacagcggtaagttccgcattgcgctgccgggccgcgagtacatggccgtgcgcctcacgcgcgtgtaaacattcataaagcgtataaatttaaataaaccgtaaaagagggcacccgcagcgctgcgcggtgtcctctttacttgacagaatctttcccgcgccgtacaataaacccaagataacaaagaaatattccgaaaggatgactatattttggcgaataaaagaaaacgccccgctgctatgcgcgaggaagaacggcaggcacagcgcgcagccgcccgtgcggagcgccgcacaaggcgagccgcagagcaggccacacagaatgtcccgcagaagacggaagccccgaaagcgccgcaaaaagcaggcgtgcctcataaaaagaagaagatcaacaagttccgcgtggcggtcgtctgcaccgccgctgtgctcgtggcgctcgttgccctcggcgtggccagcgctgccggtgtgcgcacgcccatcagcagtatcgccgcagacggcgagccggagttcttctccaccgtaaaaccgcaggccagcgccgcaccggcagaaaacactgcttccgccgcgcctacgccgtcttccgcttttgacggcgcacttttcatcggcgacagcatgacgacgcgcctgaaaagctacgtcacggacggcgcaggcagcaccaccgctttgagcgacgcggaattcatgacccgcagcgattattcgtggggcgaagcgcagaacgaactaaacggcggtgagggcggcctgtggctcgacgatgacaccgctctcaccgtcacggaagccatcgaccgtttctccgcgacgaagctttacattcaactcggcaaggaagacctcacgtataacgacgtttccgacgtcacgtccactgcacaggcggttatttccgcgctgcaaacgaagtacccgaaccttgaaattaccgtgcaggccgttacgcccatgctggagtggattgactatcaggggctcagcagcagcaccatcgcgcagtataacaaagcgatgcagacctattgcacgggcaaaaagaacctgaagttcttaaacatcgccgcattctgtacagagggctaccttcccgcggagtattgcgctgaccccgagggcttgtgcatccacttaaacgacgagggctgcgccatttgggcagattatctcctcggcaacaaaacgccggagccgtcgcccacccccacgccgacccccgatccgaacggcgacagcaccgataacaccgatacaacggacaccgccggcgacacctacacggacgattccggcgattatacggacaacacaggggattacaccgatgatacgggcgactatacggatgacaccggtgattacacagaagaataacctacaaaatatggcatgcaaaatgtttggtataccatattttgcttttctcaaaactttttgaaatttttttgaaaaaaggcttgcaatttagaaagagatgtggtattataataaagccgtcagatgaggcggcaaacagaatagttggtgttgattacaacgagggtccacctgttcccataccgaacacagaagttaagctcgtttgtgctgaaaatactcggctggcaacggcccgggacgataggttggcgccaacacttagaagaatcacagaaatgtggttcttttttatttttcaaaagctaaaagccccctctgtcagaggggttttttcatttacgcttgcttttagctgtccgcgcagaaagcttgagcaaaactttattccttcaacaggttttacttcacgacttaccatattcagcaaaacaacgggaaaaaacgccttttttccctaaaacatggcgtcaaaaaacattgacatatccgtgaaattgttgtaaacttttttggaattctgcttttttcgtctgcgtgctccggcggcaggcggacaaagaaaaaagatatacaaacggaggggcggagaccggcactttcctgtgtggccgcacgcgtacctcgaagaaaggtaagtgttcaaaaagtggaaaaaaccctgatttgtctggccatcgctctggtcgtcggtctgctgatgtcccgcttggcaaagctcgtacatctgcctgcggtcacggcgtacctcgtcggcggtctgctcatcggtccgttctgtctcggcgcgctgaaccttccgtacatcggcttcaattctctggagcaggtggagggcctcagcgtcatcacgcagacggcgctcggcttcatcgcgttcgccatcggcaacgagttccgcgtctcgcagctcaaaacgatgggtaagcaggccatcaccgtcggcattctgcaggcggtcatcacgactattgtggtcgatatcgccctcattgtcctgcatctcatcaatcccgccctcctttcgctgccctctgccatcaccctcggtgccatcgccgcggctacggccccggcggctacgctcatggtcgtgcgccagtataaggcagacggcccgctcacaaagctcctgctcatggtcgtcgccatcgatgacgccgtgggcctcgtgctgttctccgtgtccttcggcatcgccggcgcgctcgaaatgggcagcatcagcgttgtcagcgtcattttagagcccatcatcgagatcgtgatttccctcgtgctcggcgcactttccggccttgcgctcaactggttagagacctatttccattctcgcagtaagcgtttgtccctcacggtcgccttcgtgcttctcatggttggtatctcctccatggaatttgagctcggcggcgtgaagatcggtttctctctgctgctcgtctgcatgatgaccggtacggtcttctgcaatgtgtgcagcgcttccgaagagctgatgagccgtctggatcgctggacaggccccatcaacattttgttcttcgtgctttccggcgcggagctcgatttgaatattttaagcaacccgctcgtgctgctcatcggcatcatttacatcgtcttccgctctgtcggtaagatctccggctcttacatcagctgcgccatgacaaagtgcagtgaccacatcaaaaagcatctcggcatcacgcttctgccgcaggccggcgtggcgctcggcatggcgctcaccgctacgtcccttgcagacggcagcatcgtgcgcaacgtcgtgctgttctccgtgctggtgtatgagctcatcggcccgtctctcacaaagcgttccctgcttgccgcaggcgaaatcaagcccgagggcaagaccagcgcccgcgaggagaacaaacctgtaaagcccattaccctcaagtaatttcatagaatacaaaacgcaggaaggcaaagcgctttcctgcgttttttcatgcccgatttcatcttgaaaacagggaacaaatgtgctattatggtgaaaagaaattcttagggggcgtttgagtgcgcgttgtgattgcgatggattcgtttaaaggcagtttgtcttccatagaggcaggcaaggccgtggcagagggcgtacgccgcgcagacggcgcaatcgagtgcgcggtgtgccctgtggcggacggcggcgaaggcacgtctgcagcgctcacagagggcctgcacggcgaaacggtgcgcgtgcgggtcacgggtccgctcggcgagaaggtcacggcggaatacggcgtcaaaggcgatctcgccatattggaaatggcacaggcagcgggcctgccgctcgtaccccaagataagcggaaccccatgaaaaccaccacctacggcgtgggcgaaatgctgcgcgatgcaataaatcgcggctgcaagcggtttatcctcggcatcggcggcagcgcaacgaatgacggcggcgcaggcatgctgcaagccctcgggttcgatcttttggataaggacggcaaccccgtcccgttcggcgcagaggggctgcgcgtgctcgcaaaaatcgagaacaaaaatgccctgcccgcgctcaaaaactgcgtcatccgcgcggcgtgcgacgtcacaaacccgctgtgcggcgaaaacgggtgcagtgccgtctttggtccgcaaaagggtgctacacccgaaatgattcgcgaaatggacggctatatgcgagattacgccgcattgacgaaagaactgtatcccgaaagcaatcttgatacccccggcgcaggcgcggcgggcggcctcggcttcgcactcggcgtgttcctgcacgcagagctcatgcccggcattgaaatcgtcatggaggaaacgcacttagaggaaaaaatcaaaaatgccgatttcgtcgtgacgggtgagggcagattggacgcccaaaccgctatgggcaaagcgcccgtaggcgtggcgaagtttgctaagaagtatcacaagcccgtcatcgcgtttgcgggcggtattgaaaagggcgcggaagcgtgcaacaaagccggcatcacggcgtttttccccgctgtgcgcggcgtgacgacattagacgaagccatgcgccccgaaaccgcggcggaaaatctcgccgaaagcgcagagcaggtctttcggcttcttaccctgcgataaggaggtacggtatgcacgatatttggaacccgtggcacgggtgcgtgaagtgcagcgagggctgcgcacactgctatatgtattttctcgacagtcagcgcgggcataacggcgcgaaaatttaccgcacaaaaacgggctttcactatcctttaagccgcgaccgcgcaggcaactacaaagtaaaaagcggcgagcagctgcgcgtgtgcatgacgtccgatttctttttggagcaggccgacccgtggcggcgtgaagcgtgggagatcatggatcagcggcgggatatttcgtttttcctgctcacaaagcgcccggagcgcgtagaaaaatgtttgccgtataactggggcgacggttgggagcacatctttttcaacgtcacgtgcgaaaatcagcgccgcgcggacgagcgcatccccatgctgcacagcctgccgtttaagcacaagggcatcatgacagcgcccttgctcggccccatagagattgaaaaataccttgcgatggggcagattgagcaggttatctgcggcggcgaaaactacgacggcgcgcgcccgtgcgattacgactgggtgcgctcgctgcacaggcagtgcgcaaaccaaaacgtcacgttctgctttatcgagacgggcacaaacttcatcaaggacggtcggcggtacttcctgccgaataagcgcgtgcaaagcgaaatggcgtataaatccggcatatcgtatcagggcaagccgatgaaattcaagctcgaagacgattacggcctgttcgacgccgggcgaaaatacgaaaaatactttggcccccagtgcgaaaaatgcggcagccgcatgatctgcaacggctgcgcaaggtgcggtaaatgcactgtgctggaagggaaatgaaaaaagaccgctgtatgtgcgtaatgcaaatcatacagcggtcttttaattttctaaaaagctatcgctttttcggggccccccttaatagggttccccgatttcaaatgtccaccggacatttgaaactcctctcctgatttttggtaggcaaaagagtttcgtcgtctgcggacgacgaccaaaggtttcacttttggaaacggacaagcttttgaaaaagtttgagcaaaacttttaacccacgttgccggtcactttgttctttccgtcttcttccgtcccgtaaaaattgaaacgccgaagatgacgaaaagcagcagcaccgcaaagcacatccagctcacaaacaccgccgtactcttgccgctgaacatatcgtagtagcctttcaggtaaatgatgaccacaatcagaggcagaatgtactgcatgtaaaggcggatccagtgcgggaacttaatgccctcgcctttgttcgcttccttgaggaaattctcaaagccccaaccgtttttgcgcacgcagaacagtacgaacacaaggctgcccagcggcagcagattggaagaaacaaggaagtcttccatatccataatgttgctgccctcacccagcggctgaatgccggaaagcacattaaagccgagaatcgccggcagggaaagcaccgtgatcagcacaaagttcacgcccacagcctttttgcggctccaaccgccgatatccatgaagaatgcgagaatctcctcgaacaccgcaatgatggtcgaaagcgccgcaaacgacatgaagatgaagaacagcgtgccccaaattctgccgcccgccatgttattgaagagcgtcggcagcgtgatgaacagcagcgacggacccgagcccggctccaccccgtaggcaaagcacaccgggataatgatgaaacccgccatcagcgcaacaaacgtgtccagcagcacgatgttcaccgcttcgcccgtaatgcgctttttgcggtccagatagctgccgaagatctccatggagccgatgccgatggaaagcgtgaagaacgcctgcgacatcgccgcaaacaccgcgttgccgaagcctttctttgccacttcaccgaagtccggcacaaggtagaacttgatgcctgccgcggcattcggcaaaaatgcggagttcacagccagcgcaatcatcaaaagcagcagggcaatcatcatgactttcgtcactttctcaatgcccttttccaggccaaagccgcatgcaccgaacgaaataacaatggcgacaatcgcccagaacgtcagcgtgcccggatttgtcagcatatcgccgaacacgccctctaccgccttgccgtccaagccgacaaacgtaccggttgcctccataaatgcgtatttcagcatccagccgcccaccatggtgtagaacatcatcagcaaaaagctgccgagaatgctgatccacttcatgcgatgccatttcgtgcccttcggttccagtgtatcgagcgccttgcccatgcccatgcggctgccgcggcccacggtgaattcgcacaccataatgggcagacccagcgccacaaggaacacaagatacatcaggatgaatgccgcgccgccgtatatgccggtaatgtacgggaatttccacacattgccgataccgatggcgcacccggccgaaactaaaataaatcccaaccgagaaccgaatttttctctttctttcatacgttttcctcccaaattttttcccctgtatattttaaagaacgcatatttgcgttctaatcgggcgaggttatgtgcggaaggcgtttctttgccgcacaacttcatagaacatcacggtcgccgcaatattcctcactgcatgtttttcagcatggcgaccgcatcccgcacgtattccgagagcgtcttgtcctgtacgcccactacgcttacggagcagcggttaacgggaatcaggattttcttagcaacgcattcggaaacggctgccgccattttcggcgtgatctcgccccaaagcgcgtttgctaagataatgccgatgggtcccacgatgacgtctgcccacgtgcagtttaccacaacggggttttcgcctgtggcggcagcgtccgcaccggcgcgcagcatggcgcttgtggcaaggctgttcgtgcccacggcaacgacttccacgtccggcatgttctttttaatttggtcagtcagtgctgcgcccattttgccgccctgaccgtcaatcacgagtattttcatcaaaatcaaccctccgtaggttcgtttgtgtcgccgtccaaaacggcggaaacgggaagttcgccgtacatcagcgatgtgcagttgatctgcatatcgcccacggtgacgggcttgccgtccgaatacacctcaaggttagaaagcgtcatgcccgcagcttcataaaatgcacggaacgtctttgcaatggcttccagagaagacgtggagctggcggagtctaaatattcctgcaaagcgccggaaaactgcaaacgcacctccagcatttcgccgctcttcatcgtggagacaacctcgccgtctttaacgtagtcgagcgcgtccagcgtcacatcctccggaaatgcgcccttttctgccattttctgcacgagcaccgcaccgtctgcgggcagactcttatagctgtactggtcaaggccgctgtcgctcggcacaaaaatcgaaagcgacatgttcacggcttcgcgcgtgtcttcggaagcggtcggctccggagtcagcgtcacgtggctcacttcgctttccgcggcggacgagaccggcgtgtcgctctctaaaatcacgtccggcgtgcgcacgtatttcgtgccgaaccaccccgcgcgtacggcgacaacgcacaataaacagattacaatgacgcctacggccgcaaacggcatggcgcggtctacgttgcgcttcagacgctttgcgcggctgttcgcggtaaaatgcggatctttcgattcattcaaaacagaataatacacgcggtgcagaagatcgtccggcgtttccagggtttctacccattcgcgcaggtcgtcctcgctcatgttcgcggcttttttgactttttccagctgattttgcacggcagaagcggattttccggtcacgcggccgataatgcgcgtgttgtcacctgcaccgtagtgcagcgccaccgccgtcaacagcgtgtaatgcaggcgtaaaatgtcgcagagttctttcggcgtttcaaacggcatgtcttttgagcgctgtgcaatctgctcgtccgtcagcttttttcgaattttctgtgcataatagtccatgcaggtcttgtgcgttgtgcgcagcacccaaaggcgctcctcgccttcgcttttaaaggtttgcgtgtctaaaaagtactgcataaatacatcggaaagcagtgtaagcgtctctttgccgctttttgtgtgcatataacagatgcggaacgcgtcgtcgccaaagcgcatcacggcgctttgcagggcggtttcacttcttgtctgtggttttgccatttgcatcgtttcctttctctgagatgagtttgcggcggcgacgttctgttttcaggtcggaaacatcgcggttgatgccgctgtgctgcagccacatggcgatctcgccgccgatgagcaaaataaacatgcaggcatacagccataccattaaaatgaccaaagcggcaaggctgccgtagatggtggcgtagtttgcgaagttctccacgaaaacggagaagataaacgagaataagacccacccggcagaagccagcgctgcgccgaaaaacgcgttgcgcagggatacctgcttgcgcggaatggcaatgaacatcaaccagaagaagaacagcagcaggacataggacatgatgggcttaaagcggttgatgagcgtcgggaacgccggcggcatcaccgtgatgagccattcatacagcatgtcgccgaagaccatcaggcccatgctgacaagcagcgtcatgacgaacacgaccgtgtataaaatggctaaaatacgcataaaaatatagttgtggtttttggaaacgtcaaaaacggagtaaagccccttgatcagcgccaccatagccgtggaagcggaccaaacgcaggtgatagccgtcatggaaatgagcgtctgcggcgcgtgcacctcttgaaataagtaactgacaacttcttccaccggcggcggaagcatttgaacgaatgccacgagaagcgaggtgtcttcaaaccgaatgacctgcaaaagggctaagaccagcatgaggaacggaatgaacgaaatgaggatccagaacgaaacctgcgccgcgtaggagtcgatggcgtcgttattcagtttttcataaaaccagccgaagtgctttttcagcagaattttcacggcgctttctcccttctcacgctttccttacgtcttatcgcgcaatttgagaacagtataacacagaaatatagaattttccagtgaaaaagcacttgacaaaagaaaaaacgtgtattataataatctacgctacattatagagcagatatggcggcatagctcagttggctagagcattcggttcatacccgaagtgtcgatggttcgaatccatttgccgctaccatctggcccggtggtcaagcggttaagacaccgccctttcacggcggtaacacgagttcgattctcgtccgggtcaccagaaaaaagagccttgtcaaaaagacaaggctcttttttcaacgaaataaatcccttcgggatttgtgaaattgcccttcgggcagtgaaatgttgctgcgtaacgtgaaatacctgtggtgtgtgaaccgcgctgcagcgcgtagggatttatttcatttcaattgatgcgtagcatcaaatttcacatttcgcagcgcgaaatatttcacttaaaaatatcgaatcttgtcaaataaaacacgccgtctgcgaaccgaaagcggttcgcgggcggcgctttaaattttatttataaattacacaaataatcattcaaagtcgtgggtgtaaatttcgctgccgtcgccgttcaagtagacgaggcggacgtgcacgccggagaggcttgaccatcgaccgttttgtaagcttattatgccgttcgggcataaaggctgtgttaagcaagaggactttggggcgattgaaacagcaaaagactggcttttacaacgcggttgacaaagtggatcatttcctctttgctgtacttgtcatagccctccacaacgacatgcatcaaaccgtttgacagatgggtatacatcatctcaagctctgtttcgtcggtatagggcagctctttccgccagtaagcaatgctttcctccttggccaaagcaatcatccgcatgaggaccgttgcgcttgtattccccagaatcaaaacccggcaggcggcctgattctgatcgaccatatcgtaaatggcttcgatcagtgccgtcacatcaaacaaattgacatagcgaagggatttctcaaaggcatcgatgagttcattctcaatgctctccatcagggcaaagcaatcgctgtaatgggcatagaaggtggcgcggttaagctgcgccagcgcacaaacctccttcaccgtaattctgtttacgggtttttccttcagcagtttcagaaaagactgcttgagcaccatttgcgtatagcgtttccttgcgtccattttctccatatagagcccctcccaaaaaagtttacaaagaaaagcaacacttcaacagacaatgttgcttttctttcagtcgtatggcaagtgctgattgtttccgcctttcctctcaagtatactgtacttgtgaaagataatcaacacttgtatgcttatttgagaggaggctttttgcatgtttgatcaatatcttgttacaggcgctaccggcttcctcggtagggctgttgcggaggagctggtacgccgcagagcgcaagtgcatgcgcttgtgctgcgtgatgacccctatatccatttgctccccaaagaagtccataccgtcatcggtgatgtgtgcgtggaaagctcgttgacagacttcttcgcggatgccgacagccgtacctgtgtgattcactgcgccggtatcgtctctgtcgcgtccagacccggttcgaagctctatcaggtcaatgtaggcgggacatggagggttctccggcaatgtatggagcataatgtgggcaaaatggtctatgtcagctccgttcatgccataccggaaaagtcaaaggattgcatcattacggaagattgcgaattctctccggggcttgtggacggagattacgccaaaagcaaggcaactgcaacagagctggttttcgatgcggcggagcgcgggctgaatgccagcattgtctttccctccggcatcatcgggccgggcgacatacagggagggagcttcacctcaatggcgaaatcttttcttcgcggaaagctgccctttgccgttcgcggcggatatgacttcgtggatgtacgggatgtggcaaaaggcattctcgactgttccgagaacggagaacccggtaagggatacattttgtccggccactatgttaccattcgcaagatgcttcagcttgtgggaaagaccgcaaagcagaagtatcgacccatctgcttgccactggggtttgcaaagctggcggctccatactatgaacgtcgaagcctgaagaagcgaaagccgctgtttttcacaccttattccgttgccgtccttgcctcaaacggacaattcagccatgccgcagcatcggaatgctttgcatatcatccgcgcccggtgaaggatactttgcgggacatgacagcctggcttttggagcagaggagaaaggacgaagtgtgacctcacctaaaagcaccttgggcaggctgcgcgtgctattggtatgatctgcggttccggttgctatccgtacgtatcctgtgatataatttgaccaagagaacgcggaaaagccgtccgatccgcgctttcaggaacagcaccgaaattccggcagggcaagcgcctggcggatacccctctgcatttggagcacccgcaaaaaggaagtgaacgctatgacctgcgacgagactttttaccaccgatatttgaacggcgacgatgcggggctggaggccctgatgaaaaaatacggcaatccgctaaccctgtatatcgacgggtatctgcacgatgtccacgaagcagaagatttgatgctggatgttttcgcctatctgttcacgaaaaagcctcgcatccgggacggtggcttcaaggcatatctgtataagacggcgcggaatatggcgctgcgccataagagcaagcggaagtgtctgttccgtttggacgagctgaccgatgaatcggacgggcagctgcttgtggaggaggttatccgaacggaagaacgaaaccgcattctgcacctctgcatgggtgaaatgaatccggattaccgggaggttctatatctgacctattttgagggtatgagttacgcacaggcggcggaggttacgggaaaaacggtaaagcagattaccaacatggtgtatcgcggaaaggaaagcctgcgaaggcttctggaacgggaggggattacaaatgcggagtcatgaagaacgcgtcgcggaggcaaagcggcgcatcgccaagatggagcgggagaaacggctgcggcgcaatacgattaccgcggcttccgctgtggcggcgtgccttgcgctgattgtgggtgtgtctttcgtcatgcctgatattgccgtaaaaattcaaaccggcggctatgcgggctttgaaacggcggcaagcatctttcacggcggcgcggccttgggatacatcgtcatcggacttctggcgtttcttctcggcgtgtgcgtgactgttttgtgcttccggctgcggcaaatgaatcgggacgacacacaggataaggaaagcgaggaacggcatggagctgattgagaacctgctgcagctgctggtcacgttcgtcggcgcgctgctttcgggcatatcctaccggaaaagccgcaggcaggcgtattttctgctgctgtgcttctacggctgctttgccctcggcgcgctctactggacgctgtatctgctgctgttcgataccacgccgaaggtgttttatgtgtcggagttcggctgggtggccagtgtgatttttctgcggatattgcaggccacgctggcaggcgcagatgagcacagcttccgctgtcgcagagcatggcttgcgcctgcgttcggcgtgccgctgctggcgttctactgcaccttcggggatattctctccaacctgatctggtgcggcatgatgatatggttttcctactgcgccattcgagggcttgcctatgcagagacccggacgggcgcggcgcggaatatgcggtacttccacatcggcgtgctgtgctttgcgttcgcggagtacctgctttggacggcgggctgcttctggccggatacttccccggcaagccccgtcttctggtgcgatatgctgctgacgctgaccatattggggctgctgcccgctgtgagaaaggcggtggacgcatgacctatattgaaaacatatttctgtgcatggtgtccccgctgctggtggctgctctgtgcatgggcaggcggcatctccgcttttttctgttctgcatcgtcggaatgggtgtgtgcctgctttcggcctacatcaatactttcctcgcgtcggtgtgtcaggcggacgcccttgccgccacggcggagattgcgccggtggtggaggagatgatgaagctgctgccgctggtgttctatcttctggtgtttgagccggagggggataaaatcaaggctgccgcaataacagttgcccttgcctttgccacctttgaaaacgtgtgctatctcattcagaacggagcagaccgtttctccttcatcttcttccgtggcttcggcacgggagccatgcacgtcctctgcggtctgatcgtgggcggcgggcttgcctatgcgtggcagcggacatggctgaaaattgcaggcacctgggggttgctgggcgcggccatcaccctccatgccgtttacaatctgctcatcgcctacggcggtgcggcgcagtatgtggcctacgctctgccggtgctgctggtagcggcgggaaggctgtctacgttccgtttatcgcggatgaaataaccgaacattcacaccttgagagttgcttttttggcggctctcaaattttttttggaaaattttgcgttttgggtgagagtttttccgattttatgtacctatataagtgaaagggtttttaggccacagtttcagacaaaccggagaggagggtcaaactgtatgtacgataccgcaagacgggtcgcactcgtccggcagcgggtacggaaaaacacccgccgaaggcagcagcatgatatatacggactgagtgccgcgtgtatgctgctgttcgcggtgctgatgcaggcgatgagcacggttgtcaggccgggacagaccgccgcatggggcgtgttcggcgcgatgctgctgcgcgaggatgcgggcggctatgtgctggtggccgttgtatcctttgccgctgcggcggcaatcaccgcgctgtgcatgcggttcaggatcagagaaaaccggaaaaaaggcgggacaggcaagccggacccgcaggaacaggagggaaaaacgacatgaagaaacgaatactcagcattctgcttctatgctgtatggtgctgaccatgatgcccgcgacggtctttgcggcggatggagaggttgccgcacgcgcatcggaaacgggcggcctgtatgaatgccatgaggcctacggcgcagacccggcagggacatccgatactatgatgccaaaaacgaggagcggggcagcccgtcccgctgccacccaatacacctatacgctgcattacgatgccaacggcggcagcggcgcgccgccaagtcagagcgtgattagctcggaatttcatgtatgggtccccatatcggacaaaattccgacccgtgacggatataccttcatgggttgggcgaattctcggaccggtaagccgatatatggcggaaacggcggttataccgagtgcctggtagtacatgggtatgatatgagcacaaccatctatgccatatgggaggtgcacaaccatagctggggcgaatggacctccaacggcaacggaacgcacacacgcacctgtatcgcggacagcagccataccgaaacaggcaactgctccggcggcaaggctacgtccacggagaaggctgtttgcgaaacctgccataaggcctacggagagcttttgcagcctgccaaaacggtcatcaccaccccgcccacgctgcgccttccggcctatgtcggcaatgagtacaccgacaaggcgctcatgggcggcgaagcgaaggccgaggggacggacaccgttgttcccggcacgttcggcttcaagtattatgaaggcggcagagtacacccgggcgaaaaccgcatggtgatcctctttacccccaaagatacggaggcatacaccacggcggaatgtatccttaccgtggtggggacaaagcgcacgatcacaagagtcccggacgacgtgatcatcacggacaagcccattggcacggcgtttgaggatctggggcttccccttttccctttcggcgtcaaggttgagaccaacaccggcgcgagttacagtcccgtgcccgtgacatgggacggctccacctatgacccgaacaaatatggcgagcagatcattaccggcaagctgcatgttgaaaggagcggcttcacggatgatctggagccgacaagcacagtcaaggcaaccgcaaggataacactcattgacgaccgtgtctttacgcccacgctggagccgcccacctattccaagcagctctacggcggcgacctgtgcttccttgtgtttgccgataaatatctctccggcggaacggccacggtgaacggcgaaacggtttccggcaaattcacgctggacaaagatcagaaaatatacggacattccttgacggcgagcacgctattgcaggcggggcagctgcaactgaagatcatcttcacgcccgacaacctgaagcggtataacaaggcgaaatgcaccgttgatgtgaacgtcgttccccgcacattcaaggagaccagggccggacacattaccaatgaaaaattcggaacgccatttgaggagctgaatctctcggattcattcagcttttatgcggtgggcgatgaaaaagatcccgagggaacagggatggacttcggtatgaatgtcgtcacctcatgggacagctcgacctacgaccccaattcgtttgaggagcagaccatctacggcgaagtcaaccgcgccgaattggagaagtatttcaccataccggaaaacgccgacctccgagccgtgagaaaggttcagctgcagcctgacccgaccgagacggagatcacgcagctgcccgtattccgatggaagaacggcgattttacgttgcccgacaacaccatattcacttggcgaaagcttcaggtgggaacctacaacgatgaagtcggcacgctcgtcggcggcgtggcaaaggtcaagggtacggataccgtcgcccccggcacgttctccttcaagaatgccccgccgttctacctccagactccgggtgaacacgatgtgacggtggtattcacgccggacgacctgcgtctccacaagccgacggagattaccatcaaaatcaacgccatcaaaaacaccatcaggaatatcgatgaaccggatcccattaccgataagccgttcggcacgccctttgcagagctcggcttgccggaaaatgtgtgcatcaatgccgttgacggcgcatggcgctgggtcgacgtggcatgggatgaatcgtcctatgatgcggagtccgtggattggcagaccatcaccggcacgccggtgcttagcaatgatgacggagacatctttcagcagccggagcctgcggtaacagccgcgattcgggtgaagcttatcgataaccgaccccctatgccaccgacaatcgtcgcggaaagcctgcccgacggcatggaaggcgaggcttacagcagccgcttgaccgccaagggtaccgcgcccatcacatggagcattgtgagcggcgtcctgcccgagggacttagcctaaacgaggacacaggagagataagcggcacgcccgccggggaagggaccgaggtctttaccgtcatggcggtcaacgctttgggtgaagatattaaggagttttccatcacgatagccaaggctcccgagacggaatacgccgtcatcgtcagggacgacggtcacggcacgggcagcgcggatcccgcctcggcgacggccggaacggaaatcaccctgaccgctgcgccaaacgcgggctaccattttaaggagtggcaggttatgagcggcgacgtgacggtaagggacgacaagttcaccatgccgagcgacaacgtggagatcaaggccatcttcgaggaggatgcgccgcctacgcccacggagtacaccgtcacctttgacggaaacgacggtacgccctctgtcgacagcatgaccaccaccaagcagaagctaacctctctgcccgatgcttcccgcagcaagcacagcttcaacggctggtacaccgaaaagagcggcggcacaaagattacgacggataccgtgttctctgcaaataccaccgtctacgcccactggacgcataccggcgacaacaatccgcccgtcaactactacacgctgcgctttgaaacaggcggcggcagtgctattcccggcgtgcaggaaacgtacaatacctacattgatttgaccaagtatgttcctactcggcacgggtatacctttgtcggctggtacagcgaacggagccttgtgaacaaggtctcagacatttatctgaccggggataggactgtgtatgccggctggcgcgcggttacaatcccgcagaccggtgacagcggtcaaatgaatttatggagcaccgcgctatgtgcatcttttgccggatgcgttgcactgatcgtatggaaaatcaggcggcgggagaaaaaatcactgtaaatccttaaaaagtaaaagtcttatcttcccagaaaagcaggaaggctgttcttcaaaagaacagccttcctgcttttccgcttgatgtgtatgcacctgaaatcatttctcaaacaggtacaggaggtacccgtagccctcggcctccattttttcataggggacaaagcgcagggccgcactgttaatgcagtagcgcacgccattgggggactccggatcgccggtgaacacatggccgaggtgggagtctccggcgcggcttctgacctccgtgcggcgcatcccgtggctcagatcctctttttccaccacggcggggccttcgatgggctttgtaaaggcgggccagccgcagctgctctcgtacttatccgtggaggaaaagagcggctcaccggtcacgacatccacatagatgcccttttcaaatttgtcccaaaactcgcccgtgaaggcgcgctccgtgtcgttctcctgcgtgacgcggtactgctccgccgtcagcttgtcccggatggactctgccgcgggcttctgatagtcgcccgggtcgatgcgcagtttggagaagagttccatctccgcgcgcgggatgtggcagtagccgtccggattcttttcgaggtagttctggtggtattcctcggcgggatagtagttcttgagcgggccgatctccacgaaaaacttctcgctgcggccgcgctcgatctccgcgatgcgctccaccgtctccttcgcgctttcgttggtgtagtagacgccggtctggtactggctgccccggtcgttgccctgttggttttgtaccgtggggtcgatcacatagaagtaggccaacagcagcgcatcgaggctcacctgctcggggtcgtattccacccgcacggtctcccgaaagccggtctcgcccttgcaaacggtcttgtaatcggcgtccgcctcgcaggtgccgttggcgtagccgctctcggcatcgatgacaccggggatggactgcatcagctgttccatgccccagaagcagccgcccgccagatagatgacattttctgtggtatccatataagtgatctcgtcgtcggaccggtcaaaggccgattcgtccatggttgcttcctgtccgcttttttccttcggcacagtctgctgcccgacggcgcagccgctcagcagcagaaccgaggcgaaaagcagggccaatacgcttcgatacatcgcgtttcctccttttagaagaatcagggcttacgccccccttcgcccgccaagggcaatgcaatggcgtgcagcaggcactttttaaatttcgggtcagcctgcgtcggcggcaagagcctggtcgatgagcttttgcagcgtctccgcttgatttttttccgtgatggcgcctacgatgggttcgcccacgatgttgccgttgcggtcaaccacataagtggtaggataggcaaagatgttggtggtaaactttcccgcctcaccatcggagttaaaatacacattctgataggtcgcgcccttcttggccagtacatcctttgcttcggaaattgccgcttcgtcgccgtccagcgtgaaggtgttgacgccgatgagggagccgcccttctccgcaagctctttgttcagtgcgtccaactcagcaagctcgcccacgcaggggttgcaggtggtgaaccagaaattcaccacggtgacggcgttggcagagaacagctcgtcacttttcaccgtatttccatccaggtccttgccctcaaaggtggggaatttctgcatgctgccgtcatcggatttctgcatactgccgtcatcgggcggcgtggtcgtgtcgttgcctgcgggcacgctcatagcgccatccgtagattcctgtgctgcctcggggtacttttcctcaatcatggtcagcttggtttcaatgtcgcggatcttctccgccccctccttgagcagcttcagctcatcctccgtaaactgatccttggcggattcgattgtactgagtaggaaatcaccgtagtttttgccgtcctcctgcatggtcatgcccttgtcggctgccatgaataccttttcccaaagggctgtgttctccgagagaatggcgttttcctgcgccatcagatctttgtgcatggcgaccgcttcctcggcattcttcggttcgctgctcattccgtccgctttgtctccgttctttgtgccgcaggctgtcaaagacaacatcatcagggcgagaagcagcagtgccagcaatcggccggccgtatttgttctattcattttcatctgttttgtttctccttgttattattgtttattgtttttctgcggctttttttgccgcctttgttttatctttgccgtctccgaagccgtaacggaagcgcacggcgcccgtcggacaggtgcgtatgcacattccgcagcggatgcactcggtatggttgggcgctttcgttacgtccacatccatcttgcaggctttggcgcattttccgcaggatacacacttgtttttgtccacctttatctgaaagagagatacccggttgaacagtgcgtaaaacgcccccagcggacagagccacttgcagaagggacggtagaatattacgctcagcacgatcacggcaagcaggataccgaatttccatgtaaacaggctccccagcgccgaccggataccggaattggcaagggacagcgggatggccccctccatcacgccttgcggacagaggtatttacagaagaacgggtcgcccatgcctacatcgtttacaaggaacgccggcagcaggaaaaccatcaccagcagtacggcgtacttgaggtatcgcaggggcttgagtttctttgtggagaacttcttcgtgggaattttatgcaacagttcctgaaaccagccgaaggggcacagaaaaccgcagataaagcgtccgagcaggacgccgagcaaaatgagaaagcctgtgatataataggaaaaactgaacttggaagagcccactaccgcctgaaacgccccgatgggacaagcgccggaggctgccgggcaggagtagcaattcagcccgggcacacagacggttttccctgcgccttggtacagtttgcccttgaggaagttcggcaggtgcaggttggtcaataaagttgcccctgcctgtatccagccgcgaaagcgggacataatctgtgacgcgcccgaaaacttcttacccaatgcctacacactccaaacataatttaatcgctttgctcagtaccgtcgcggcctcgccgcgccatgcgccgaagcacagcatggcgatacccacaaccagcaacgtggcctgcgccgctgctttttttgcacagctcaattttatcaccctttcactttttctgccatcatcatagcacaggaaagataaaatccctgttaagaacgaaaatttaatgcagatcttatctgcttttgctataataaagaaaaaggaaatgaaaagggggactcttatgcaccttttggtaattgaagatgaacgcgccctatgcgagacgattgtccgcagtttgcggcgcttggcatacagcgtggactactgctacgacggggaaaaggcgctggaacttctgggtgtggagcgctacgatttggtacttcttgatctgaacctgccgggaaaggacggcatgaccgtgctgcgtaccttgcggcagacagaccgcgagacgcgggtgttgattctctccgcacgcggcgaggtggaggacaaggttgaggggttggatgcaggggccaacgactatcttgcaaaaccctttcacttggctgaactggaggcccgtatccgcagcctgaccttgcggcagttcacccagcaagccgtgttgctgacctgcggggagctgacgttcgacacacgctcccgcaccgctgccgtcaacgggcagcccctgacactcacacgtaaggagacaggcattctggaatatctgatggtgcatcagggacggcctgtgagtcaggaagagctgatggagcacgtctgggataacagcgtggacagcttcagcaattctatccgggttcatatctccgccctgcgcaagaagctccgcgccgcattggggtttgaccccatccgtaatcgcatcggcgaaggctatttgatgggaggagaggaaacatgaagcgactttccttgcagtggcgcatcaccctgatgactgtcctgctcatcggtgtcacctgtgttgtcatgaatctgctgctttgttcctccggtgtgtactatatggacacaatcgcggacaccttacagggaggcgacacggttattatgaacagtgaaggcgcagagagctttaatccgcagctcgtaacgcccgatgaggatctgactatcgttgtcaacggagcgcaggggcgctttcgcatgaccaactggtatattacggctgtggtgacactgcttagcggcgttctggcctattttgtcagcggacgcgcgctcaagccgctgcgcagctttgtatctcaggtggagaaggtgcagctgaacaacctggcggatatgaggattaacgagaatgttctgccggagtttcggcagctgagctgctctttcaatcagatgctggagcggttggacaacgcctttgccgcccagcggcagttcaccggcaacgctgcccacgaactgcgcacgccgctggcactgatgcaggcgcagctggagctgttctccgcggagcatcccgatatgctgccggaaacggcgaagtttctcgcgcttttgcgggaacagacggagcgactgacacagatgaccaaaacgctgcttgaaatgagcaatttgcagcaggtggcgcgaaacgagcagattcagcttgccccgatggttgaggaggtcttcacagatctcgcgcttttggcagaaaagcgcaatattacgctggagatggagggagacggcttcctcatcggcagtgatgcactgatttaccgactgctttttaacctgacggaaaatgcagtcaagtacaaccgctcgggcggctcggtgaaggtttctgttacgcaggagccggaaaagcttctgatccgcgtttccgacaccggctgcggcgtcccggaggaataccaacagagcatctttcagcccttcttccgggtggataagtcccgcagccgggagtacggcggcgttgggctggggctttctttggtgtgggagatcgccaatctccacggtggctgcgtccgggtggaggagagctcgaagaagggcaccacgattgcggtggagctgccggtacagggataaggcactcgaaatctccggtgagccgttcgcggaatacgaacagatttagaaaaagcagcggttttgcgatgaacagaagggaaggcgatgaacacatgagaatcttatatgagctgtcttggttatgggaaatgctgggcatcgcgcttgctgctgcggctgtctgcgtgacttgtgctgcactgatttgcaaagcaacgaagaggcggcccaacaaaaaaatgctggcagtcgtaggggcggcagcatttgccggtgcaattctggcagtccttctgattgcgcggacaccgatgccgctttgaagatatttcatccttcggcagcttggccgacaacacgaagaagcttgcctgtacaatccgtggtcggagaatatataggctgtcaaaaaaactcatgctttcaagcggtgaaagcatgagttttttagtgtgccggtatggacagccgctgatctggtcggctttttacctgcgattaaatgtgtcgttttttaagaagcagggcgagcgccgcgaggctgcctgcgcagagcgtcagccaaagtgcgggggcaaaatcatcgcccgttttggggtggttcgtcgggcttggggttgcggttggcacggcagtcggtacggctgtgggagctgccgtaggtgtcgccgttggttccgctgtgggcgtggccgtcggttccgctgtgggcgtggccgtcggttccgccgtgggcgttgcggtgggctctgcagtcggtgttgccgtcggttccgccgtgggcgttgcggtgggttccgctgtcggcgtggccgtcggttccggggtcggggtcaattcgggcacggcaatggtgaaggtgttctttatgccctcattggccaaagatacggaagatagggaatggctggctgctatgtcattgcctgctttgtcatgcgaaaggaaatttatggagcctgttacggctgttactttataatttcccggttctaacgtgtagggaatcaagagacttacacgtgtagttgacagtgcgctaccattcgcatcaaattctgcatgtgtgaacgcaggatccgcgtcgatcactacgcccgtcagcacggtcgtagcattggtatccgtattcgtaacggtgaaggacatatctgctgacaaagaaaggtcgttaatggttatgtttggtgatagtttgatgcttgccgaagacgacactggcgcgaatgaaatgcgcagctgcccgcttgtaggccccggctgtcccggctctacgcctacgatcaccacgtcctcttgttgacagcctgccactgagagcagagcgaacagcagaatgaacacgactccgatttttatacccttgtttttcacggcgttacctcctcataaatttgaacggtgtttgttgtgttcattataccatgacatggtgtgaacgtcaattagaatatgcttagaatttattcatttttgctttacagcgggcaaaattttccgttgcagcgggcaaaacggtttttcttgcaaatgggtgttgctatctgccgtggggtatggtaaaatcaagctgtatgacccgttctataataagaagaacgaggaaaaagagaggattggttcaaatcatgaaaaatataaaaaagctgctggctgttctgctggccgcgctgctgtgcgtatctgtgacggcctgtgcaaacaacagctcttcaagcacggcggtcgcaacgctggagacatcttccgcggcgagcgagggcgagaccgcggagagtaccgacaaagaccctgcgggctatgacgatgatattcagggcctttgcaagtatcttgaagactgcaaggtggcagcgggcgaaaaggtgcagatgtcttacgacgtcatcggcgccgaaaacggctataaatatgtataccgttacgcagattccgctgtgcagcttgaagtgtatgagttcccggcggagctttccgagaccgctaaggcgcttcaggacgctgtgcgcgcagacggcacgtttaaggtgctggataacaccgtgccgggttatctttcaaacgacggccgcttccttttgatctacaccgacgcgaagtcggaaaaggaagacgcgaataaaacacacaaggagcacgttctggagtgcttcaatacgtttgcggacgcaaaggcaaaataaaaattatagggggcggaaaggcatgtgcttttccgtccttagtgctttcttattttaaaaaatcggcggcggttaggcataaatgggcatgaaacgcgccgagaggggagttgtacaccatgaacacacaagataccgtgcaccgcaaaagcgccgcagagctgcgcatacggcgcgtgatggatgcactggagaaaaacaacatgcaggcgtattatgcgcccacgtgtgcggacgccgtaaaaatcgcaaaagagctgctgcagccgggcgatgtgatttcctgcggcggcagcgtgacgctggatgagaccggcgtgatggacttaatgcgctgcggggactatgaatttttggacagaacaaccgcgaaaacgcccgaggagcgcgagaagctgtaccgtgaggtgttttcctctgatgtgtttttgacgggcacaaacgccgttacggagcacggagagctctataatgtagacggcaacggcaaccgcgtggcggcgatgctgttcggcccgaaaaaggtgctggtttttgcggggtgcaacaagattgtgcgcgacatagacgacgccgcaaagcgcgtgaaaagctgtgcgacgcccgcaaatgccatgcggctgaatttggacacgccgtgcacgcacggggcgtgtcccggcacggacggcgagctgtgcgcgggctgccgctcggaaaatcgcatctgcgcgatgtacacggttttggcacgccagcgcgtgaagggcagaattcatgtcattctcatcggtgaggaggtcggttactgatatgaaagaaaagatacaggcttttatggcaaaacgacaggcaaaaggaaagcggtcctacgagatcgacatgtgcaacggtccgctgctgggcaaaattctgcgctttgcggtgccgctgatgctttccggcgttttgcagctgttctttaacgcggcggatattgtggtggtcggccgctttaccggccacacggcactggcggcggtgggctctaccggcgcgcttatcaatttgctcatcaacgtgttcatcggcctttccataggcacaaacgtgcttgtggcgcgctattacggcgcacaggatgcaaagcagctgagcgagaccgtacatacctctgtgctgacaagtcttgtgagcggtgttatattgattgccgtgggcgttgcgtttgcggagccgctgctgaccctgatgggcaccccggaggacgttttgggtcaggcggcgctttacatgcgcatatactttgtgggcatgccggcgatgatgctgtacaacttcggcgcggcgattttgcgctctgtgggtgacacaaagcgcccgctgtactttttgaccattgcgggcgttgtaaacgtcattttgaatctgttcttcgtcattgtgttccatctcggcgtggcgggtgttgccattgcgacggtcatttcgcaggtgatttctgcgggacttgtgaccatctgcctgatgaaaacgaacgcttcttaccgtttagagctgcataagctgcatatctataaagataagtttttcggcatgatgcgtgtcggcctgccggcgggcatgcagggcgcggtgttctccatttcgaacgtgctcattcagtcctctatcaactcgttcggctccaccgttatggcgggcagcacggctgcggccaacattgagggctttgtgtacgttgcgatgaacgcgttttaccagacggcgctgtcctttaccgggcagaacatgggcgcgaagaaatacgaccgcgtggcgaaaattctgcgcatctgcattttgtgtgtgaccgtgacgggcgttgtgctcggctgcggcgcgtatttgctgggcacacctttactttctatatatacgtctgacccggaggttatccagtacggtttggagcgtatgctcattgtgtgcgtaccgtacttcctttgcggcattatggacacgcacgtgggcgttttgcgcggtatggggtattcgatcatgccgatgattgtatcgcttacaggtgcgtgtgcgctgcgtgtggtgtggatcctgacggtcttccagatgaaccgcacgctgttcatgctgttcctctcgtacccggtgacgtgggccgtgacggcggccgcgcattttgtgtgctaccttatcgtgcaccataagatgatggaaaaggcgaaagcggagcaggccgaggcggcaaaagcataaagtatacttatatatatagaagaaacgcgttgtgggatgaccgcagcgcgtttcttctatatataaagagaaaagcagaaccgcaaaaaacgcgtcttcctataactatatataagaagatatagggttgcattgtaaagctttacgataacttcacggcgattttaagtgttttaaaaacttttttcggataaaatcagaaagattatgaggaggttcagaagtgaaaggacactgatgcgccagatatataagaagatgtgcttgaagctttggggtacagagaggggcttttgcaactttaagaccaccttttcaaaaagtttttcttgattttttcaaaaaaatttcgtaaaatagtttgcgtaagccatgtatatgggcatgtaaatgcaaaaatgcccattcggagatacactatatattgtgtttgaattaaggcgtaacatatagatgtagtttttcgaaaaaaacttaaaaaaactttcaaaaaagtgttgacaaaaggggttgtacgtggtattatagtcaagcgctcgagagagacggcaaaaaactgaaagcgaaaagcttaaaaggaaagccgcttgaaagagagcacaggaccttgaaaattaaacaacgagagaaagaatggaacctgtaatttctttgagagactcaaagaaacttacgagaaacagaactcaacaaatctgtgacgaacgtcagaacgacgttatgagcgaattaaagctctgaaaaagatttgagcgcgaaagcgtttagatacaattttttagagagtttgatcctggctcaggacgaacgctggcggcgtgcctaacacatgcaagtcgaacggagttgaaaggagcttgcttttttcaactcagtggcggacgggtgagtaacgcgtgagtaacctgcctttcagagggggataacgttctgaaaagaacgctaataccgcataagattgtagtttcgcatggagcagcaatcaaaggagcaatccgctgaaagatggactcgcgtccgattagatagttggcggggtaacggcccaccaagtcgacgatcggtagccggactgagaggttgatcggccacattgggactgagacacggcccagactcctacgggaggcagcagtgagggatattgggcaatgggggaaaccctgacccagcaacgccgcgtgagggatgacggttttcggattgtaaacctctgtcctctgtgaagatagtgacggtagcagaggaggaagctccggctaactacgtgccagcagccgcggtaatacgtagggagcaagcgttgtccggatttactgggtgtaaagggtgcgtaggcggattggcaagtcagaagtgaaatccatgggcttaacccatgaactgcttttgaaactgttagtcttgagtgaagtagaggtaggcggaattcccggtgtagcggtgaaatgcgtagagatcgggaggaacaccagtggcgaaggcggcctactgggctttaactgacgctgaggcacgaaagtgtgggtagcaaacaggattagataccctggtagtccacactgtaaacgatgattactaggtgtggggggtctaaccccctccgtgccggagttaacacaataagtaatccacctggggagtacgaccgcaaggttgaaactcaaaggaattgacgggggcccgcacaagcagtggagtatgtggtttaattcgacgcaacgcgaagaaccttaccaggtcttgacatccaactaacgaagcagagatgcgttaggtgcccttcggggaaagttgagacaggtggtgcatggttgtcgtcagctcgtgtcgtgagatgttgggttaagtcccgcaacgagcgcaacccttgtgattagttgctacgcaagagcactctaatcagactgccgttgacaaaacggaggaaggtggggacgacgtcaaatcatcatgccctttatgacctgggctacacacgtactacaatggtcgttaacagagggaagcaataccgcgaggtggagcaaaaccctaaaaacggtctcagttcagattgtaggctgcaactcgcctacatgaagttggaattgctagtaatcgcggatcagcatgccgcggtgaatacgttcccgggccttgtacacaccgcccgtcacaccatgggagccggtaatacccgaagtcagtagtttaaccgtaaggagaacgctgccgaaggtaggattggcgactggggtgaagtcgtaacaaggtagccgtatcggaaggtgcggctggatcacctcctttctatggagaatcaagaacagctaaggttgttctttaacatcctaggttagattacagggaaaacttttaatcgttgtttaattttgagggtcttgatcctcaagaacggggcatcttcgttctgaaaagaatatgggggtgtagctcagctgggagagcacctgctttgcaagcagggggtcatcggttcgatcccgttcatctccaccaagggccgaaaggttcgaacaaccggtggtttaactagatatgggcttatagctcagccggttagagcgcacgcctgataagcgtgaggtcggtggttcgagtccacttaagcccaccaagcggagcaatccgcaaaatgtaccttgaaaactgaataaagcgaagcagataaaaatgcgagaaaactgttatttactagagaattatttaaaaggtctaacgatccaaataattgtttagggtaataactgcaatttcaaagaagcgaaaaaagtttaagtttattctttgcaaagagaaataactacaaaactcatttctaattccaagaagagaacacatggtcaagctacaaagagcgcaaggggaatgccttggcactgggagccgatgaaggacgcgactaactgcgataagctacggggagccgtaagtaggcattgatccgtagatttccgaatggagcaatccgattaaagtcatgtttaatcatcatacactgaatacataggtgtatgaggggaaccgcctgaactgaaacatctaagtagggcgaggaagagaaatcaaccgagattccgctagtagtggcgagcgaacgcggaggaggccaaaccaagagtagtaatacttttggggtttggacagcaatgtgtaggattaagtttagcagaatggcatgggaaggccaacgaaacagtgtgagagtcacgtatgcaaaaagcgaaatccgctagctgtatccagagtaccgccggacacgtgaaacccggtgggaatatggggggaccaccctccaagcctaaatactacccagtgaccgatagtgtatagtactgtgaaggaaaggtgaaaaggaccccgggaggggagtgaaaaagaacctgaaaccttgtgcttacaagcaccgagagcccatcaacgggtgatcgggtaccttttgtagaatggtccggcgagtgaatgtaactggcgaggttaaggacttaaggtccggagccgtagcgagagcgagtctgaatagggcgtatgaagtcagttgtattcgacccgaaaccgggtgacctacccatgtccaggttgaagtggaggtaaaactccatggaggaccgaaccgactcccgttgaaatggtagcggatgaggtgtgggtagcggagaaattccaatcgaacccggagatagctggttctctccgaaatagttttaggactagcctcgtattagattaccggaggtaaagcactgaatgagctaggggccgagaggttactgaactctatcaaactcagaatgccggataattgatgtacgggagtcagacagtgtgagataagtttcattgtcaaaagggaaacagcccagacccacagctaaggtcccaaagtacggttaagtggaaaaggatgtggggttgcacagacaaccaggatgttggcttagaagcagccactcattaaaagagtgcgtaatagctcactggtcgagtgaccctgcgccgaaaatttaacggggctaaatcgtacaccgaagcttgggatgcagtaatgcatggtaggagagcgtcgtataaggggtgaagtcagagcgtaagcgctggtggactttatacgagtgagaatgccggaatgagtagcgagaaatatgtgagaatcatattggccgaaagtctaaggtttttggaggaaggttcgtccgctccaagtaagccgggagctaaggtgaggccgaaaggcgtagccgatgcacatacggtagatattccgtagccgccaaaagatttaagtaagaggacaccttgaaaggacttgacccgggcgatggttgccccgggcgaaagggaccgaaatttagtagggaagcaagtttggacgagggcgagaaaagtcttatgtatatcttcggcgcccgtaccgcaaaccgacacaggtagataggaagagaattctaaggccaacgggagaagggtagttaaggaactcggcaaattgaccccgtaacttaggaataaggggtgccacagcgatgtggtcgcagagaataggcccaggcaactgtttatcaaaaacacaggtctctgccaaatcgaaagatgaagtataggggctgacacctgcccggtgctggaaggttaagaggagatgtgcaagcattgaattgaagccccagtaaacggcggccgtaactataacggtcctaaggtagcgaaattccttgtcgggtaagttccgacccgcacgaatggtgtaatgatctgggcactgtctcaattacccgcccggcgaaattgtagtaccggtgaagatgccggttacccgcgacaagacggaaagaccccatggagctttactgtagcttaatattgggtttcgataatttatgtataggataggcgggagactaggaaaccgtggcgccagccacggcggagtcgacgttggaataccgctcttaagttattggaattctaacctgcggccatgaatctggccgggggacattgttaggtgggcagtttgactggggcggtcgcctccaaaaaggtaacggaggcgctcaaaggttggctcagcatggttggaaaccatgccttagagtgtaaacgcgaaagccagcctaactgcgaggatgacggtccgagcagtaacgaaagttggagttagtgatccggcggtatgagagtggaattgccgtcgctcaacggataaaagctaccctggggataacaggctgatctcccccaagagtccacatcgacggggaggtttggcacctcgatgtcggctcatcacatcctggggctgtattcggtcccaagggttcggctgttcgccgattaaagtggtacgcgagctgggttcagaacgtcgtgagacagttcggtccctatctgtcgtgggcgcaggatatttgaggagagctgtccttagtacgagaggaccgggatggacgcacctctggcgcaccagttgtcacgccagtggcacagctgggcaactatgtgcggaacggataaacgctgaaagcatctaagcgtgaagccgactccaagattagatatcccatagcgtaagctagtaagaccccttgtagactacaaggttgataggctgcatgtgtaagcacggtaacgtgttcagcttggcagtactaataggtcgagggcttgaccataatccttcttggttcaagattgcgctttcttctcccattctactcttgcttctccctttattcagttttcagggtatataaaacctacaggatacacacttgtgtatcctgttttttgttatattgaaaacgattccgatttaaaaatgtggttttgtccaaagtataataataaaggaatttggactgcgaggaaaatacgttgacaattggtaacgcagttacagggtgacagggcgtttgtgccatgtttgaatgatgcggaggaatgctgattatggtgcggatcgaatttttgggcgcatggaaagacaaggacgtgcaggctgtgcgggacgtgacggtgacgggcattgaaaaaaaactgaaaatttcggttttacccgcatattttgaagaggaatattctttaatagaagaaaattgcttggctttctccgaaaattgtatgaggaacaaaaaaattgcacctgtggagtgtggtgaggcagaacgacggatgagcggtgtgaaaatcacgatctcgctgtttcctgcggggaacgggcgtatgcggcggcagactgcgcaggagatcacgaaaaatattgcgctgaagacggggatatccaaggataatatttcggtcacgctcgatgcgccgccgcaggagaggagaagctatgccgaagaacgttgaaaactttgagatccgcacactcggacgtgatgattacgcgcaggcggcggaaatttttgcgtttgtgcatgcgctgcaccaagcaaatcgcccggatatttacagaaagacgaatgtcccgctcggcgaagacgaatttttcaaaatgtgcgatgacccgcacgaaatcatgctgtgtgcggtgcgagacggcaaaattttagggcttgcccgcacggtgatgcggggaaatgccggggatgcggttactttgtcgcgtgtgcgggcggttatggaggaactggccgtgttgccgcaggcacagggcatgggcatcggcacggcactgctgtatgcgagcgaggcggaagcgaagcgccgcggtgcggaatctttggagctgatggtgtggtcgtttaataaatcggcgatgcggttttatgaaagcgccggcatgacggtgcgaagctttgtgatggaaaagaaattgtaagcgcgcaagtgttatgtaaatcaagcggtggaagcgctggcggcggagacctcggacacggtgtgtctgggcgttggtctgcatagcggctacggtgcggcgcagcgcatgtacgtgctgcgcgggtatgtgccggacggctccggcgtgtggtatgagggccgcgtgtgggaccaatatgcgccgtgcgtgaacgatgacgagctgaatttgttcctttctaagaagcttttttgatgtattgtgtggcaatttaaaatagaaatagatacaattaaaagccctgcattctttttctttgaaagatgagaatgcagggcttcgcttgttgcattttatggatttgctatgcaaatccatcggaaatccccttaatagggttttccacgagcagacagtccactggaccgtctcctctcctttcctgatttttatgcaggcaaaaaaattcgctttctgcggaaagcgaccaactttctgaaaaaagttggatcaaaaacttttaacgttgcggcgcggtgatttacgacagtgcgcaaatcatttttccgtttccatctcgatgatttttgcggctgctaaatctttggcatcgcggggatcgtgggtgacgaggatcgtggtgcggttcttgaggttttcttttacgaactgcatgactttttcgcgggtcagatcgtcgagacctttaaacggctcgtcgagcaggacggcgtcaccgcttgtcagcatggcgcggacgatggaaacgcgccttgccatgccgccggagagctgcacggcgttctttttgaggtcctcggggtcgaacccgacctgcaaaagcgctttttctgcggctgtttccgtgcacccggcggcgacggaaatgtttttagcggcggtgaggtacggcagcagccggtcttcctgaaacacggcgctcggcttttgaaagccatggatttcgccagaatccgcaggcagaagatttaataagacggagagcagcgtggttttgccgcagccggagcgcccggaaacggcggtgacttggtgctccggaaactcggcggagaaatttttgaggatttccgcttcaccacgctttacgatgagattatgcacgcttgccatttaacacgtcctccattttgagcttttttaagaccaaccgcagcaaaagcataaaaagcttttcaaatgcgacgctgacagcgacgacgacgaccgtccacgcaagcagctcgcttgtctgcaaaaagattttggcctgataaaacaccgcgccgatggagccgtccggcgtgccgatgacctcggcggcgatgccgcttttccaacatagtccgagcgacacggagcaggcggagacgaaaaacggcgcgacggcgggcaggtagatgtaaagcagctttttgctgactgagagcctgaaaacctgcgccatttcgagcaattcttcgtctgcgctgcggatgccctctaagacgttcatgtaaatgacggggaagaccatcagcatggagatgatgacggacaaattttttccggaaaaccacagcagcaccaaaatgatgaacgacgcgaccggcgtggctttaatggcggccgtgatggggcgcaggagagtctcaacgacccaaaaccgcgaggcgacccacccgagcaccgtgccgagcgtgagcgcggtgaaaaatccgcctaaaatgcgcgcagcggaataccacacggtctttaaaaaatcggggtcgaaaatgaccgtgaacagcgtttgtacgacctttacgggcgagacgagcacgagttcagagccgacgcagaggctgacgacatgccacaccaatagccaaaaagccacagcgcatgtggcggctatggctttctgtttctttgttttcacttttttctgctttgcggggttattccgtatagtagaaagcgtcatcgggcagcgttcctccaacagacttcgggtcggcgtcaaagagcacctgtaaatagccggagaccttctccttcatttcttcacccttgatgaagtggatgttgcagccgggcagagcctttaaagcaatgggctccttcggcacgatctcatactgtgcgatgagctttgcagcgtcttccgcattcgtctcggtatagttgatggaagcttcgtattcctcgaggaacttttcaacagcggcgggattttcctccagcacatcggtgcggatgatcgtgacgccggtgacgagcgtactgccgttatcgagcttatcccactcatcggtgaggctgagcgcgatgcggagcttgtcgttctgcatcatagcggtggtgacgaacggctgcggcagcacggcgatggcatcgtcggcctcggcaagcgctgcggcgacctcggtcgcttcggatttatactcgatggtcacgtcggtctcgggatcgataccgttttcgcgcagaatgtagttgagcgcgaactccggtgtggtgcctttgccggtggaatagatcgtcttgcctttgaggtcttcaacggattggatgctttcgccggtttcaacgacgtagagcacgccgagcgtgttgatgtcgagaatcttgatgccgccctcggtcttgttgtacagcacggaagcgaggttgcacggtacatttgcaatgtcgatcgtcttattcgcgatgccggcggtaatttcgtctgcggtgccgtacatcgtgacgttgtaggtgtttgcggtctcgccgttttcggcgtcctgcatcagcttgaccatgcccatggtagtcggtcccttgagggaagcgacttcataggtggcgggggtgaacgcctccggcgcttcggtgggttcggcggtcggttcagccgtaggctcggcggtgggctctgccgtggcttcaacgctgctttcggaagatgtgctctcggaggaggcggcaccgctctggccgcaggctgcaaataccgtcatgcacagcagcatggcgagcaaaacagcggttattttcttcatttgaaacggtcctttcttttgcggcattccgccgcggaaatcgttcgggagtttgtctcggcgaacagtattatcgtagcacaaaagggcgcgcattgtcaacgaattgtcaattttctgcgcgatttttcttttgaaagcggaagggagtttgtatggcggtttcacacacgaaagcaaaatttgaaaacttcccgtcgtcgggaataaaaagggtgcccggcgcgaaaaatatgcgaaaaaatagaagaaaacaggttgacgaacggaaccttctgtgctataatcatcagtgtcgcagaatatgcgggtgtagttcaatggctagaatcccagccttccaagctggtcgtgtgggttcgattcccatcacccgctccaacccgcagaaaagggacgattgccttgggcggcataaagagatatgcgccaatagctcagctggatagagcaactgccttctaagcagtaggtcaggggttcgagtcccttttggcgcgccatatggtggatgtagcttagctggttaaagcgccagtttgtggcactggagaccgtgggttcgaatcccatcttccaccccatatcaagaggatgtaactgatttcagttacatcctcttattttttgcctaaaaatggacaagtgttattattcgtgagtacaatgcaacgttttttagaaccaaatcggcggcttgataaaacaatttccattggaatcacagttactaccgatttgatcaggaatttttatattcggatggtgtcatccccgttttgtttttgaacactttcaaaaagtagaaatagtcctcaaacccacaggctgtactggtttcagaaatagtatagccggacctgagcatacgctttgcctggttgacacgcaaggttacctgcatttgtttgatcgtcataccatatacggtttggaatatagtatttagacgattgtatgttttcccaaaggtatcctcataatcccaattcttcaagtgctggtctttgttgtcatcaatatattgtaagattcggtaggccagtctgctttctaaattacaccaaagctctcttttttgcacagcgaaactaatctggtacagaatcgcctgaatttgggatgataaaaaatttttgcttgaaaaaggcaatgttcggtgctgaatcgcgtactccatcagatcaaagcagggtagctccagaggaatctgtccatgtaacggaagcaaaatatgattggtatctacctttacaggcggtggaacctgaatacctgttgcctgaaaatgagcaaaataggctgcatgattatcatattgaagcccgcaatgctgcacgtaaggaggcaacaggaaaaattcgccgctatgaacgacgtaattctcaccgtaaacacggaaagagcgttctccgctgatcatcaataccagtacccactgcgtcatcattctatccggatgcatattattgccgctaaacttatcgacatcctccacgcgaatctcctcgtttaactgaaaccagtagagatcggtttgttttatatccatggttgaacatctgccttttccagtaaaatgatcttatgatatgtctgcctaaaaggagccagacaataattcaataaatagtttcgtttattccataccattttcattctctccatagactttttttcggatacactgtatgatcgtttcaaagaatcctaggagggatacaacgtgaaaaacggtaaattaagagtggcgctcgtaggagtctccttcggcgcggaatttatacccatctatctgaaacacccggacgtagattctttggtgttagtggatacgaatgaaaaactgctgaatacggttggcgataagtttcttctagaagaacgcttgacggactttaatgccatgttggaagataaaaccatcgacgccgtccatctggtaacaccgcctgctactcatgctcccctatctatacaggtgatgaacgccggaaagcactgcgcctgtaccattccgatgggaatgagtatcgatgaattgtaccaagtcatcgatgctcgaaaaagaagcgggaaacactatatgtttatggagacctccgtctatggtcgagagtttctgtatgtgaagaatctttacgaaaaaggagagctgggcagaatacagttcatgcgctgcgcgcattatcaagatatggaaggatggccggactactggttgggctttcctccgctgatgcatcctacccatgcggtagcgccttgtctgatgttgttgggcaagcgtccggaaaccgtatattgcaagggctccggcagagtacgtaaagaagtggaagctccctatggttgtccatatgcctttgagtcagctctgatctccctaaaagacagtgatgtaagcattgaaatggctcggttcctctaccacgtagcccgaggctacactgaaagtttcaacatatatggtgaacgaaaaagttttgaatggcagcagttagaatcggaacaaccggtactgttctccatggcgcttggtgcaaatgctgaacatgttatgaacgattacggtcgaggcggccttgtgacggaagaacgtatccaaatccccgactatgcagatcgtttaccggcggaaattgggcgcttcacccaacaaacagtgtatgatgacagcaatccccatctatcgttcctgcaaggcggtggccatggtggttctcatcctcatctagtccacgagtttgtccgaagcattctggaagatcgaaccccggttcccagcgatattgacggcgcctactggaccggtgtaggaatctgcgctcaccaatctgccatggacggtggcgtggtaaaacgtgtacctgttttcgaataaaaatcttctttagaatctataaattcaaccagacagccgtattcccttgccttgaagggaacacggctgtcttttactgtctgtttttacacacctatttccccataggttggggagctacgtaatgaagcgctccgtcagtgttaaattcatccttacaatagcaaaaagcaaagagcaaaacaaccgaccattggttgagtcctcgcttaaaaccatattcttcttttgtctatcttccggctttacacaagggggagctgttgtttcgcggaagcaaaattctcaaccgaaagccatcttttttgctgacgttgacgcgggaaaggacccttttatatcaagaaagaaaaaacggaaatgccgtagttgtacaaaaagaaaaagtaatgaccaaatctctgactcagccgatggcttttgacggttaaaaatacaggcgaaaaacgagaagtttcgggaggaaaatgtactccttttaaaagacttttatcaaattcgaataaatatcgggtgaaagtagataaaaagtggtaaacaatcataaattcagccattttgtttgcagggcttacgctttataatattgccacaacatccaatttgacaagtgaaagctttgtcagagataatggagaaaggaagatgagggttatggcagaaaatccaatgggaagacagcggtcgggttggcggtataagctataccgagctggcagagggattcaacgaaattggggattgtacttgttgttacttccggcggtcgtgttgctgttttgcttcaactacttgcccatgtacggcgtgcaaattgcgttcagggatttttctccttcgcagggaattcagggaagcccttgggtgggacctgcgaattttcaaaaattctttaactcattccaatctaaaaacctgatttggaatacggtgagcttgagcttgtatagcttgattgcaggctttccgttccctattattttagctctgatggtcaaccagatccgggtgaaacgattcaagcaggttttgcaagtggtgacctatctgccccactttatttccacagtggttatggtgggcataatgttaatccttctttcccccagcaacggaatctacggaaatctggcccgggtgcttggcgttcagaatccggtcaacatcatgggagaggcgagcgcctttcagcacgtctatgtgtggagtgatgtgtggcaacacgcaggttgggacagcattatctacattgcggcgctggcagcggtggatccctctttgtacgaggcggcaacggtggatggtgccagcaagatccaacggttgtggcacattgatgtgcctttcctgattcctactgcagtgatcctgctgattatgcgtgcaggcaatgtgatgaatctgggattcgaaaaggtgtatctcatgcagaacccgttgaacaccagtatcagcgaagtaatctccacgtatgtatacaaaatcggtatgatcagcaatcagtacagcctttctgcggcagtaaacctgttcaacaccgttattaactttgtattgttacttctggtcaacggattttccaaaaaacttggagacacaagtttgtggtaagcggagaacgtacggactgaaaatttttagcgaaaagaggcggatgcattatgagcgcacaaacaatacataaatcacaaaaagtgagcaaggcagatgttgttttcaacattattctgtacggaatctgcggcttgatcttgctgctgattgcgtatcctctctactttatcatcattgcgtcttttagtaacccttctgaagtgtctaacggcaacgtgtggttctggcccagccagttcacgctggacggatataaagagctgttgcgtcacgggagtatctggatgggttattggaacaccatcctttacacggtagtgggaacagccatcggcctgattgtcaacatctctgcagcatactctctgtctcgcagagatctggtaggacgcaagttaatcacgttttatttcatattcacgatgttctttaacggcggcttgattcctacttacttcaccattcgagattttcatttatatgacacattctgggttatggttttgcctttctccgtaatggtgtacaacatgattgtggccagaacattttttgactccagcttgccaaaggatttgttggatgcagcacagattgacggctgtgggaacctgcgattctttttctccatcgctcttcccctctccaaagccgtaatcgctgtaattgctctttacattgccgtggcgcagtggaactcttactttaatgctctggtttacatacgcagcgagaacttaaaaccgctgcagctggtggtgagaaatatcctgatcacgaaccagtctttggtgggtgccggtgacggcatggctgctcaggaggccatgcgtttggcaaatttgatgaaatacgccgttatcatcgttaccaccgtgccgattatgtgcatgtatccctttgtacagaaatatttcagtcagggcgtaatgatcggcgcaatcaaggggtgagttttctccccaaatcactctgtgacgttaccttgggaatataccctgaggatttcaccgtcaaataaaaaatcctatagtgaggagatgcaaacatgaaagaaaagtggacaaagctaggaaaaagcctgatttgtttggccctggttacctccatgctggcaggctgtggcggcggtggcaaaagcagctctagcagtgagaaacagacaagtggcggcacttcaggtgaggttgcagcaggggacgataacttcaatgagacgggcttgcctattgtcaaagaacccgtggagttaactttcctttacgtcaaaggcgccaatacgatggattttaaagacaacgccatgttccagcagatggaaaaggacaccaacgtcaagatcaactggcagtacgcaggcgatgcggactggtctgagcagaagtcgctcttgctggccagcggtgatttgcccgacgtattcttcggagacaatgctctgaaggataatgacattgccaccaaccttgacatgttcattccgttggaagattatgtggaaaagtattgccccaacatcaaggcagcttgggaggcagagcccactatgcgtcagatggttaccaatccggacggccatatctatactctgcccggtaagaagcctctgcgtccgaagggctgcgatacgcccttcatcaacaaggcatggctggatcgtttgggcctggaaatgcccaccaccgtggacgagtggtacgaagtgctgaaggcctttaaggagcaggacgccaacggcaacggtgatccgaacgacgagattcctctgaccggcagcgctaagacgaatctgtttgactggatccgctacatcaacccctggggcctcgtggacagcatccaggagaacttcctggctttggatcaggagacgctgaagcctgttttcattccggctgacgagcgctataaggaagcagttgctttcttccataagttatacgcagaaggcattatggatccggagttcatcacgcaggatggttccatgtccgacgcaaaatggaaaaacgcagatgtatctctggtaggtaccggtatcgcttgggaaacctcctctgctactcagcctcattcggacgaatatgttccgatgcttccgctggccggtcctaacggcgaccgctacatccgcggcaacgatgaaatcatcatttatcatcgcaacgagtataccattaccaccgcttgtgagcatcccgaagtggctatgcgttgggcggattacttctctaccgatgacatttctgtccagtcttactggggcccctacggtgtggcgttgaataaggacgagaacggcaacattaccttcttggatcctcccgaagggaagaacggtgaccagtggtactgggaaatttgcccccgcgactacggtccgaagtatgtgacccccgagtttgaagcgaagatcactcttcccgagaatagcggtgacggcgctaaattgaaggaagacgagatgatgaaggaatttgtggcaaagccctatcctgttgtgaactacaccgctgaacagtccgaagagatttcttctctgacggtggacatttacaagtatgttaacgagacctgggccagctggattgtcaacggcggcatcgacgagcagtgggatgcctatgtggatcagttgaaccaaatgggtctggagcgtttaatggagatttatcaggaagctctggatgtttacaataacgcgggctaatggacaaatattgatttgttgagattttaggaaagctttcgagcaggacctgaaggctgttccggccttcaggtcttgccttgcttttatcgaaaattcaagaaatcaaatatggagaacaacagatagtgttggaggagtttcatggagaaaaaagtatttcgcgtgggaagtgtaggcattggtggaatttctcgaggcgttcaccttcccggaattcacaaaagcccggatctggaacttgtggccgtgtgcgatctaaagcctgagcgcatggagtacgccagaaatacatacggtattcgagaagatcactgctttgcggattatcacgatttgattgcttgcccggatgtggatgtgattgacatttccacttccaacaacgcccactttgaggtggctaaggcagctattgaagccggaaaaccgttttgcttggagaaacctgtcaccttaacagcggaggaggccgacattttggccaaagccgcacaggaaaaagggattcccaatatggtgtgcttttcctaccgctttaaggctgctgcccgctacgccaaggaattggtggagaagggaatgttaggcgacatttatcacgtttacatgcagtatctgcagggcggcggcggtccttcctatgatttgccccgttcttggagataccaaaaaaagctgaccggaaccggcgcactgggcgatttgggttgtcacgctctggatttggtaagttttgtcaccggtaaaaattaccggaaggctgtgggacatacggatacttatgtgacccagcgccgtctggaagagggcgaaggatacggtccggtagatgtagatgacttctgccattacttgatggagatggatggaaagacttcggcaaatttctctgtcacccgatttgcctatggcagaggaaattaccagcgcatggaaatatacgggagcaagggcggcttggtgtacagcttggatgttactcccggtgtagatgaattagaggtctgctttggctacccctatgacaggtccggaatctacacaaagcttcccattccccagcgtttccagtgcgatcagatgcagtcctttgcagatattctcaacgggtgcagcgatggcatggctgccaccattcaagacggctgccgcattcagcatgcattggacgtaattatccgctctgcggaagaagaaaaatggctaccctgtgattaattcatgatatgagaggagtttttttaaaatggcaattcgagtaactgtttggaacgaatacctccatgaggttcaattcccggaagtggctgaggtgtaccccaagggtattcacggttgcatcgcagactttctgaaagaagctggtatggatgtgaaaaccgccacgctgcgagagccggaacacggactgactcaggaggttgtagacaatacggatgtgttgatttggtggggtcacatggctcatcaggaagtgtcggatgagattgtggatcgcgtttacaatcgtgttctggaaggaatgggccttatcgttcttcattccggccatgcctctaaaatcttccggaagctgtgcggaacggattcctggaaattgaagtggcgtgaggacggcgagaaggaaatcctttgggttgtagatcccagccatcccattgtagacggtctggacgagaaaattataattccgcacgaggagatgtacggtgagcgctttgatattccccagccggatgagcaggtgtttatcagctggttcgaaggcggagaagtgttccgcagcggttgctgctggcatcgcggaaaaggaaagattttctacttccgtccgggccatgaggtgttccccatctatcatcagccggaaattcaaaaggtgattatcaatgcggtgaagtgggcagcgcccatccgtttccccaataccacctttggaaatcccgcacccattatgcccgttaagggagagatggaacatagtgttcaggggcttcacgaccagaagagcatctcctaaaaagcagatgtgtttctttcttaatatctcttaactaaggaaccaatgtgaaaaggccaaggttcttgcgcgggaagcagggataacgaaagcgcgcctttcatcagcatcagccgttggaaggcgcactttttatctgaaaaattatttcccggcaagagaattcgaaaaaatcaggttcactcctgcaaaatggatatcgctttttggtactgctgctttttccaggtgtccagcaacttatagtctcctctttgcaactcactgaccaaacgagcgtaggtcggcgcgatttcatcggcagaacaatcctccaccaaattcacgatctgattttccagaaatttctgttttcgttcgtctgccgtagccagacgtgtgttggagtagagggaaaacaggatttcatagtgaatgatcggaacagtgtactggctgtcaatgccgatagatttcatcggttttgcattcttgagcaaatctccaagcccggagcgctccaaagcgttcttctgttcgggagaaggctccatgttttgcagataaaatgctgccaacagtctggcttggaattggctttgtgtgctgcttttaacaaacagggtggagacgtattgttcctcgaaattgttgctgagtgccggttcccgtccggaatccgagaggatgggcgagaggatttcatattgttcccaaattgggtgactttccgggagcagggagagcagcttgcccagcgagggggaagccgccaaaaagatctcgccgttttgcagctgtctgagcagggactcttgactgagggtgaacacatcgcgggaaagcagtcgctcacggaacagggtgttcataaactccagtgactccaaagtaccggggtgaaaaaaaggatcctcccacgcagtgccggtatcggcagtgacgccaaacatttgttgaagactgggaagctccacgtagcaggaaatcaactcgggataggctttccgaacggcttttagctgttccaagcaatacgctttggacaggggctgctgactatcccagtgaatcttttccagaatgtccttgcgaccaatcatagcggcggcagacttgacagaggtatcctcagagagaatggttccggtatgcggataggcgtaaacatctccctgaaaatttccgcaccaccggataaagttttcgggcagggtaaagccgggaatttccttgtccagcaagtcctgcagagcccaggtagttccggttgtttccaatcgtttaaagttggaatcagtgtaccaacaggtgaccacatctgcagagattcccgatgctgtcatgttcaaatatttttcaatggtgcaaaaggagagttccacaggtgttccggccaattcggtgcaatcctcttgggagagaaacaggtcagcataggaggaatccgtctcgccataaggtgttatgaaaatccatttcaaagcggtttctttctcgggggatgtcgtctgaaagggagagggactggaagttgagggtgagcgaatacagaaaataagaaaacatacggcaatcaatccgacaagcgtttgagcaagcttatagggaaataagcttttgcgctgtttatcgttgtgtggagtatccatggcaattcctttcttttggagtatagctgtgtcgactacgagtcgataggaaaaattgacattttttgctatacttgttatactatatcataataaactaacaatctcaaaatgtccagaggttttttatgtaaattttataaaaactgagtttgagattttaataccggttttttgatgataggaaaggagaaaaaagtgaaacagtggctgagtcggatgaagctagcgcacaaaatggttcttggatttttggggctcatcgctctaccgtttaccttgctgtcggtgttcagttttgcctcggttgcgtcgcactatgaacatcagctggcgcaggatgggcaatatatgctgaacatggtagtcagtgatgtgaacgaaaaaatggatcatgtggaaatgctgatgcaggtgttgtcctgcaatcaaaatctgattgcttttctgtctcacgattacaatggcgccgtctctcacgaggagtacacgcaaactgcgatgccgttgctgcagggagcgagcaatgcggtgtcaccgcctctggaacgcgtctatttactgacgaaaaacactactatcccggagggctacagcgcagtgtaccattacgattctgttccgaagagtattcccacagagctgttggagaacggaagggaagccacttggtatcatgcggagatagacggaaaagatgtactgtactacctttgtcccattgtttcctcggtatataaaaatcaggggtatcttttggccaaaatgcaagtggccgagttgttcccagagttcggaatgccacaacagagtggtgtggccctattcctactggatgaggaaaaccgacctaaactcagcaatgtaacgctgaattctgatttccgtttcccgcaaaccgcaggttatcatgaatctgtgcggtatttttccaccgagattcagcgggttcctctgcgcgtgggtgtggcgctgccagtgtcggagcacggatatttgcagcagagttctctgctcatcttaatcttcgtgggatttctttcgctactgtttttgtctctgttcttttccatgattcgctccatcaactctcgtcttcagagatatggagatgaaatggagcgcattgccgaatccggtttcaacggggagttagcggtagaacgtcaggatgaaattggagtgattggagatcaattcaaccgtgtcttgggcagaatgcgcgtcttaatgcaggagaatatccaaaaggaaaccgcatataaagacgctcagttaaaggctcttctgcttcaaatcaatcctcactttatctacaacaccttggacatgtttgtcggaaagctgactttggacggagagcttgaaacggcggattacatttgcgactttgcccagatgatccgctataacaccatgacgagcacagagcttcctttggagaaggaactggagcatgtgattaattacgtgaacctggagaagtgccggtatggagacagcgtggagctgcggattcatgtcccggaggagcttcggcagatcattattccccgctttttgcttcagcctattgtggagaattcctttgagcatgggtttaccgggatggctccggaggagaaaaggcaaattatcatcacggcccgcaagatgggggatcgaatgattcttcgtgtacgggataacggcaggggaatgagtctgaaacaagtggaggagatgaatcaaaaattctctcagccctatgatgccatagctttgcgtcatcagaaagagcatggaattgggctggataatatcaatgatcgacttcagattttttctcattccaatgatcgtttggtactgaggagtcgggagggaaagtataccagtatgtttattttacaaacattatagcagttttttagaaaaggtaaacgcaaaaagctgtcttataacgggtgcgcttttcgccggtgttggccaagtaagacggagagtttgacagaaaagcggaggatgcagatgcttacagtgatggtggtggatgatgatccccttttgtgcacagccatgcgacgaaagatagagatgattgacagggaaaaccagttaggaattcaagagacgctgatagcccactcggcccaagaggcatgggggattttgcaggaaaagtccgttgatatattgatcagcgacattcgaatgccctatcagacgggtctggagctggcggacaaggtaaacgaggctttcccggagattcagctggtgattctgagcggctatgacgattacgagtatatgcggagtgctctccgcagcggagtggtggattatctgctcaagcccgtaaagctggtgcaaattcaggaagtgctgctcaagtgtcaggagaatcttcgccgccggaaggcgcaatctctccgaaacggcaacgaccgggaggtactggaaaactggctcaacggcttactcgcgggtaaaaccggcaagcccccggtggaatttccccatccggtgttctgggttgcatggccttttggcggggaaggagaagacggtttccgggctgaggaagtctttgccgaggaatcgtcggagaatgtggcggcattcttttttcgcaacgtaacgcaagacgcagttgtgctgttgaataccgaaagcagccgggaggacattgtaaaagcgtacatcgaaacgtgtcaggagtcctgtgtcaggcagggggcgggacggccctgttttgcagtgagtcgaccgtttacgcgtttggaagagtatcctgtgttttataaagaggcacggtacaccatggcctatcgcatgctggagccgttcgaccttcggttttcctctgctcaagcggctacggagcaaagccggtttccgcggtttcaagcccggattcattcggcctttcagagcagaaattttgctgagctttatcagttgcttcaaaaaatcttctgtcgggaattttttcaggagcagccctttcctaaggagattcgacgattttatgtgtattgggagtctcaggttcaggagatggcttctgcgtatcatctggaattggaagcgtttccccactttagcagatttgccagtttaaatgaaatgcaagaatacctgcagaaggttttgaagcagatggaggcggctgtgcagaccgctacaaacaagtatgcccatattctttccatagcaaagcagtatgtgcagaataattacaaccgcgatatcagcatggacgaagtggccgagatggtttccatgagttacagctactttagccgtgtgtttaaagagcagcttcatcaaagcttttcggaatatgttctgtctgtccgaatgcgagaggccaagcggttgatggaagaagatcccgcaatcaaaataaaggaggtggcagaactggttggctatgaaagcgtgtataccttttccagggcgtacaagcagtactatcatgtctcgccgaaacaggatcgagacggctaaccggaatttttgccaaaacatagacagcatattggagaaaggaattttaaaatggaatataagaaacttgggaaaagtgatgtactggtctcggagctcattctgggttgctgggccatgggaggagattattttggcgcaacagaggacaaaagctctttggaggcgttggaagtatcctatgagaatggtgtgaatacctttgacacggccgagatttatggcgatggccgttccgagcgagtggtgggcgaggctgcccgccggattggcagggaaaaggtgcgaatcatctccaaggtgttcaagccctctatgtcccacgataagatgattaaagcctgcgaagacagccttcagcgcttgggtaccgattacttggacgtttactttttacactatccggtagcggaggaagaggttaccattcaggaaagaatggagaccatggaggaactgaaaaaggccggaaaaattcgagcaatcgggttgtctaatttctctctggaagagatgaaggcggctatgaagtttggacaggtagatgtgattcagccttgctacagcctgctgtggagatacgatgaagccttgctggagtttagccgaaagcaggagatttcggtgattccttacagcacgctggctcagggattgctgacgggaaagtaccaaaaaggcgcagtgttcacggacggacgcgctcgagcggccctgttccagccggaaaactacgataggtgtctggaagtgacggacgtactgtcacagatcagtgcgaaatatggcaaaacaccggcccaaggcgccattgcttggctgctgcaaacccaagggattacggcaccgatcgtcggagcgaaaaacggaagacaggctcaggagaatttgaaagccgccggctggcaattcagtaaggaagactacgatgtgattgaccgagccagcagacgctttatggagggcttaccccattacacactgttcttcaatacggagacaacaaactgagaggagagaaaagagaatgccattggttaaagtaaatgagctgctgcaccacgccacggaaaacggttacggagtagctgctgtgaacgtgttcaactacgagacgattaagtgggtggctgaggcggccaatcgggagcgaattccggtgattatccagttttatcccggcttcgacaagtacatcgccttaaaacatgtggcggctatcgccaaagattttgcagaaaaatcttcagtgcccatcggcgtacatctggatcattccgccggctatgaaatagcagtgagcggcgtgcgggatggctttccgtctgtgatggtggacggctcagcgttgccgtatgaggaaaatatggcgctgacagcagcggttgtgaaaacagcagcggtgtttggcgtagacgtagaggccgaactgggtcatgtgggctcgggagccaatctggatgacatcgtcaacagcgatcattacaccgatgtaaagcaggctgtggaatttgtgcaatgcacgggttgcggatctctggcggtggctgtgggcaatgctcacggtgcctacgtgcaaaccccgaatctggactttgatcgtattgcttctttgcgtagcgctctgcccattccgctggtactgcatgggtgttcggatattcctcccgagcagttgcaggagagtgtgcgcctgggtatgagcaagttcaacatagccactgagtattttcgggcttgctatcacggtgtggtacagcatggggatccggctgaaaagaacggggacatgttccgactgatgatggagacttccgaaaacgctatagattttgtacgcggtaaaatgcgtttgcttaatccgaataagtttacattttagttaacttaacgcaaaggaggctttaggaagagttgtgttaaaagaatttgaaatagcgggctatgacatgccctgtgtagacctggcagtgaatgtggatgtgtttcccaagccaaacggaggaaccgggataaacgctatgagctggcagggcggaggaaaagtggccaccggcatggtggcggcagccagattgggagctaaatgcgccatgataggtgcggtgggaagcgatgactacggcgagttttgcttacgggattttgaacgtcatggaattgacatatccggaatgaaaacgcgccagggagaaacgacatctctctccatagtgctcagcgaccgcgagacgcagggacggagtattgtgtaccgatccggcacggcaaatccccctacgttggaggagatagaggaacgaattctgacggggtgtcagtggttttttatctctcatgccacacatgtggcaatggaatcagccaagcgggcaaagaaagcgggagccaaaatcatcgtggacgccgattcctactcatcggaaatgatggagaatatcggcatcatcgacgtttttattgcttcggaattcttctataaggtgcttttccgtggaaaggaggaggcctttgaagcaaattgccgggaggtccaaaaaatgggcccttctattgtggtgttcacattaggagcaaaaggctgcgtagggtacagcgaggaggatggcttttttcagatgccctcctttgctgtggatgtgcaggatacagtgggggccggagatgtgttccacggcgcatataccgtaggattgctgcgcgggctttctcccaaagaagccgctcggcttgccacgggagtttcttgcatcaagtgtaccagaatcggtggcagagccggcattcccgattggaatacggtgcagcgctttttgcgcaccggggaaatcgactatacggaaattgatcagcgtgtagaattttataggaggaagttgcagatatgaaaaagcagaacattgtgattggcgtagcgcctactaagcgcagctttttgagcatggaggaggccaagcggcaaaaggaaaagtttatggctgttattcgcggtattcatccggatgtggtcactctggtggatattgatgacatatgcgaaaacggaatactgttcgaaacggaaaaaataacacaggtggtggaaaaattccgccgggcaaagattgacgcgctgtttaccccccattgcgattttggtgaagagcagtgtgccgcaggagtagcggcggcgatgaaggtacccaccttggtatggggtgctcgagatgagaggccgaacaccgacgaaagccgaggaagagatacgcagtgcggcatgttcgcctgcaccaaggtgatgcgccggttcggagtgcagtatagttatatttggaactgcgagaccgaaagcgaggatttccgcaatggctttgacagctttatccgtgtggtgtccgttataaaggcggtgaaaaatctgcgaatcgccaagtttggagcaagaccggaaccgtttatgagtgtgacggccaatgagggagatttggcaaccaaattgggtgtgactgtggtgccgatatctcctaacacagtggcagcccgtatggatcagttgatcggtgaaaattctcccagattacaagattacgtggcgaatgtaaagcaacgtatggatgcttccggtatgaaggaagaggcggtggagagagccgcagcagctaaactggccattcaggatctgatggaggaaaagcactgtgcagccggagcgatggagtgctggagcgcggttacagttttaggcgcacctgtctgcatggctttgggcgagctgtctgatgaaggattgccggtttcctgtgagacggatgtcaacggagcggtgaccatggcgatgctgcaggcggtcaccttgggcaaagaggcctgtttccttgcggatttgaccattcgccatccgcagaacgacaacgcggagctgctgtggcattgcggtcccttcccgtattccttgaaggattcttccagtgttgcccgacttgtccagggacaggaacggtttgaactgaaaaagggccccattacggtatgccgtttcgacgatgtggacggaaagtactatctgtttggcggtgagggcaaaggagtagacggacccgaaaccaatggaacctatgtgtggttcgaaacgaacaactggaagatgtgggaagagaagctgatgtttgggccctatatccatcatgtgggtggaatttacggaaactacaaaaaggtgctgcgggaagccgcccgttatctgggaatgatttttgatgatgcggacgaacagggcgtgtatagcctgtaatcttagaaaggaaaaattgccatgagagagattgtttcaaaaccgttggatcgggaggcgtttcgtccctatggagattttgtggatttgctccatatcaagcagatggatgctatggccggagcggataatatcttcatcccggatctgacgacactccgtttagatgaaagaatgcaggcctcggtatgcgtggcacgggtgtcccagtgtgagagaatcatcaccgctgtggaataccatggatttaccagcgagggaattcttcctctggacggtgatattgatatatttgtgggaccttccagttttcaggtgaaccctgcgtccattgaggcgttccgtgttccccggggtacctttgtccggctgaatcccggtgtgcttcacggccgccagtttgtcgtggattcccagagcgtcaatgtaatgatcttgctgccggagcgcaccttcggaaatgactgtgtgttcacgcggctggcagaatccgatcagattaaaattctgttgtaaaggagtgattccatgaatcgagaggcaatatttcacaatccggtcagcaattatgcgtttcccatttcttatgaaaagttcaaggttcgcttgcgtgcagggaagggcgatttggaccgagtgactttggtcattggaaataaatacctctggcatacccgcaaggaagttcccatggaggtggaaggttcagacgagctgtttgattactattcttatgtgtatccggtagatgaccctcgcgttgcctactacttccttttggaaaagggggacgaacagtggctgtatggggacagcggtttcgcaaagccggaactggtcaacatagacgaggatgaatcttcagcctttgttaacttccattttccgtttatcaaccgcattgacatccataaaaagccatcttgggtcaacagtgcggtgttctatcagatttttccggagcgcttttgcaacggaaaccctaagctttctccggagaatgtggcgccttggggcaccgcgccggacagacagatttttatgggcggagatttgccgggtattacccaaaagctttcctatttggaagaattgggcgtgaacgccctgtatttgaccccgatttttgaagccacttccaaccacaagtatgacaccgtggactatacgcgcatcgatcctcattttggcgatgaatccgatttggtggagctgattaatcaggctcataagcgtggcatccgagtgattttagacggcgtgttcaaccattgtggcggaggttttaggcagttccaagatgtggtggagcacggagaggaatctcctttccgggattggttttacattcgggaatttccggtgagttttgatcctttgaattttgattctttcggagacactccctatacccccagacaccccggtttgaaaaatttatctgaagaacagttgagaacggcctgtatgcccaagtggaacacggaaaatcctcaggcgaaggaatatcttctgggagccgtggccaagtggacccgcatgggtattgacggttggagactggatgtagccaccgaggtggactcccatttctggagagagtttcgggagaccgttcgggggatcaatcccgatgcactgattatcggagagttctggcgcaattcggaagcgtggcttcagggggatcagtacgatggcgtgatgaactatggtgttcagcgcgcggcagtggagtactttgccaagagcgcagtggctcctcagcgttttcaggaacttctcacggaaaatttgatgcgctattccgatgcagccaatgactctatgctcaatctgctggacagccacgacactgcccgcttccttacggtcagcggagggaatacggcgcggttgaaaaacgcggcggctttcctgttcacctttgtgggtatgccctgcacatactatggcacggaaattggtatgacgggtgagaacgacccggattgccgtaaggcgttcgactgggaggaatctcattggaatacggatttgcggacgcactatcagaagctgatgcggttgcgaaaaaccagaaaagcgctgcaggagggaaccgttagattccgttctcagggagatttgtttgttatggaacgccaattacaggaagagcttctggtgacggtaatcaacaacacagattgtccccaaaactacacgttgtcgggaaattacgtccgcgatttgttaagtgaaaaggcctttgaagggactcagaatgccaccgtggtggaagttcctcccttctctgcaatgattctggaaaaaataaattaattttatttaatttataacttaatttaaaggagttgtaatcaacatggaaaagaaagttattcgcgtaggatctgtaggcgtaggagccatctggggcggcgtgcacgagcccggtattgccaagagtcccgatttgaccttggtggccatctgcgacattgatgagaaaaagctcgaagccgttggcgagaagtatgggattcctccgcagtaccgttttacggattatcgagatttggttaactgtgacattgtcgatgcagtggatatctgcacctctaatgacgcccacttcaaggtggcaatggctgccgtggaagccggcaagccgtttaacctggaaaagcccatcaccctgaccgcagaggaagcagacatactggccaaggcggctcaggagaagaatgtcaagaatatggtgtgcttctcctaccgattcaaggctgctgcccgctatgccaaggatctgattgcgcagggcaagatcgggcgtgtctatcacgtgaatatgcagtattttcaggcgtggggattgccccgtgccaactgccccttagtatggcgctatgtcaagagcagaaccggtacaggcgctctgggagatctgggaagccatgccttggatttggtacgatttgtgacgaacaaagaatatacacgcgttgtgggacataccggtacttacgtacacgagcgtccgttgctggacggcaaaggtgtcggaaaagtagatgtggacgatttcagcaactacatggcggatatggaagatgagatttctgtcagcttccagattacccgatttgcttatggccgcggtaactatcagcgtatggagatttacggcagtgagggtgccattgtctacagcttggatgccacacctgccggaattgacgaaattgaagtctgctccggagacatcaatgccgatgcccatgttttcaaccatctgcccattccgcagcagtatttctgcgatcagatgcagtcctttgcagacattgtgaatggcaccggtgatggtcttgctgccaatattcaggatggacaggcaaaccagcacctgctggatgctattgtagagtccgcagagaaaggcacatggttatcactctaagcaaaattccaaaggcgaagagtgacggtggctggaaaaagatacaggcacctttgaaaatcagtgtagagtaagcaaccgcgttccgctttaactttaaggcggaacgcggttaactctatgtaaagaagcatttgaacgatacagttgagaaaaaggcacaacttacggaggaaaaatccgtaggttgtgccttagtgttattcgtgaaattggaatggattacgtaccacacgtatgcgattgctgcatttaaagagaattacatcaagattgatcgtatcttttgtctctttttgtcatggctttattcagtcaatctcgccgttggctttcgcggcctcaataaccttctgcgcaacattctgcggggcttcttcgtagcgcacgaaatcgaacgtgaagctacctctgccctgcgtgacctggcgcacataggtgctgaaatcgtacatttcggccattggcacttcggcgtctacggtctgatagccggcggtttctgccggagacatgcccagcacacggccgcggcgcttgttgacttcgcccatgatatcgcccatgttagcgtccggcacggtagccttcaattcgccgatgggctcaagcagaacgggatttgcctgcggcatgccgttcttataggcgatggaagcagcggtcttaaacgccatttcgctggagtctacggggtgataggagccgtcatacagcgtcgccttgagaccgacgaccggataaccggcaagaggacctcttgcgatgcactcgcgcagacccttttcaacggcggggaagaagcccttcggcactgcgccgccgacaacgcgctctgcaaactccaagccgtctgcatcgcagggggagaattcgatccacacatcgccgaactgaccgtggccgccggtctgcttcttatgtctgccctgtacggaaacggtcttgcggatcgtctcgcggtacggaacgcgcgggttgcgcagcgtgacatctacgccgaacttcgtcttcagcttggagacgatgacatcaaggtgctgttcgcccatgccgctgatgaccatttctttggtttctgcgttattttcaaaacgaatcgtcgggtcttcttccgcaagacgcatgatgccctgcgcgaccttatcttcgtcgcccttgttcttcgggacgatggccatacgcatctccggggtggggtatgcgatgccgtccagtgtgaccttgcgtgcgggtgcgcagagcgtatcgcccgtgttgacgccggcaagcttcgggatggcgccgatatcgcccgcagtgatggcttttacatcttcctgctttttgccgcacatcatgacggttttgccgacgcgctccgtgtttccggtgcgcatgttgatgagcggggtctctgtggagattttgccggagagcacctttacgtaggagagtttgccgatgaacgggtctgcaacggtcttgaagacgatggcagccgtggcggcatcttccttaacggcaatctcaacggggttgccgtctacgtctacgccgatttccgcgcccttatccgccgcgctcggggcgagccagcaaaggccgtccataaactgctccatgccgcgcataagcatagcatcgccgcagaatacgggcgaaatggtgccgcttttaacaccctgggaaacaccgacgataacctcttccggcgtgaattcttcgccggagaaatatttctcgaacagctcgtcgctcgtttcggcgacggcctcgtaaatggcggtacgcagaccctcgaggcgggcgcccatgttcggcatatctacctgtacaggcttgccgccggagtaatcgtacgccttatattccagcatattgatatatttatctgccttgccgtcctcaaaatacggcacaacaatcgggcagacggacgggccgaagctcgcctttaaatcttcgaacactttatagaagtcggaaccttcatcgcacaggccgtttacgaagaaaatcttagacaggccgcgcttttccgctgccgcaaaagccttttccgtaccgacggaaacgccgctcttgcctgcaagcacgatgacaacggattctgccgcgcgtgcggcttcatacagaccgccctggaagtcgaaaagacccggggtgtccagcaggttgatctttttatttttccattcaaacggtgccacggccgtggagacagacgtcttgcggcggatctcctccgggtcggaatcacagaccgtgttgccctcgcctactttaccgcgacgatcggatgcgcctgcaagataaagcatagcttccgcgagggaggtcttgccggcgccggaatggcctgccatagcaacgttgatgatgttcttagccggatatgtgttcatggaaaaacaccccttatatgtataatttataatttcaatttgagattgctctttaattatatatcatattgccagctattgcaatggtgaattgcaatttatacagatattctattttgtgtatttgaagtttatgcatgttgtatatttagaaaatgttttttgcaataagttttcaaattccttttgaaaaggatagaattcggcaggatttgagaaatatatagcagacttcttccgatgagggagctgccagcgaagctgactgagggagaaatacagcgggctaacgaacctcacagcacctttttcatattatagagaaatcctctcccggcgtagccgggagaggataaattatatcagtcggcaaaaagatttcgctttctgcggagctcgaccaaaggcgctgcctttggaaactacaaccgaacgagaagttcggtttcaacttctttgaaaaaagttggatcaaaagctttcagcgactctttccatgttactcaactgtttcgcggcttaaaaaatcggacgcgagcttgccgagccgcaaatgctcctgcgtttcgccgggctttgcgtcttcgtctttaatgagcaggaacatgccgcacaaatcgcccgcacaggagatggggaacgctgcgtttgcggtgcgcagcccgccctccgccgccaaaacggtgtcctcgccggaggagatgaatgcctttttgcggcgcatcagctcatccaattgcttggagacaggcttatccagcaaatcctttttcgggatacctgccgttgcgatgatgcggtcgcggtcgcacacggcggtgccgatgccgcttgccgccgagatgcactccgccatgtttttggcgctttcgttcagttctcccacgggcgagtatttgcggaagatgatgctgccgtctttgtcgatgaaaatttcaagcggcgtgccctcgctgatcttcatggtgcggcgcagctctttcggcaccaccactcgcccgagatcatccatacgtctgacgataccggttgccttcatatctcaaatctcccttgttttcaaagtttcggtatgggtagtatttgagaaatgcggggaattatacacgttacaaagttttacggaaatacacagtggcgcgcccggtatctgctttgacgtgaaaagcggcatggtttgaaaaggattgttttctgtgttgatatataaaatcaagcgtcatgcttgaatgaaagcacggcgcttgacttattaaaaataaattttaatcttccacaggcgtttccaaattgttcattacaagccctgtgataagtttcgggtaaaaatacgtggacttctgcggcatcttttcgcccgcagccgctaccgcgccgatctcctccacgcgcgtggggttcaaaataaatgcacactgcatctcgtcgctttcaaccgtggaaagcgcttcgttcaaatcgcgcgtatacgtcaagtttttctgacttgccatattttcgcgatcaatcccgagggcgcgctccaaaatgagcgtgtgcaaaacgctgacgtccagcccgcgcgaggcctcgctcttttcgggcataaattcttccataaccgccgcgtctttcaaaatcagcagcgcgtagttcattctgtccccgtttttatacacgaatacgaacgccttttgcccggcatcatacacatttttcatgcgcggctcaatctcgcttttgtccgcaagcgtctcgatttgaaagtattccccgcagctttcaagtaccttttcggcggaaaagccctcaatgccgcgcacaaggcggtgcgtcgggaacaccacaagccccggatgtgccatatcgacgagcgtcatcatgacgaattcgctgcccggcgcccaaacggcattttcacggcagtaatcgcggtaatgaattgcggtttcatagcggtgatgcccgtccgcaatgtacaatttgcgcggcgcaaaatcggcgcggaacgcttcaagcgcctgcttgtcattcacaatccacaggcggtgtgtgacaagttcgtctgaaaattcgcagtacggcgtgccggcggaaaggcggtcgatgcgcttttgcgtctcgcccttttcgtcctgatacaaagagtaaatcgagctgaagttgcagttcgtcgccttcatcagctcaaaacggtcctttttcgccttagagagcgtctcctcgtgcggcagcacaacgcccgcagaaaaatcctccacgcgcacaaggcacacgatgccctttaggctgcgcacctcgccatggtctacgtcggttttgaattcttcctcgtagatataaagacctgcgtccttgtcacagcgcaaagtgccgtcggaaagccacgtgtgcaacgtcttgccggcggtcttatacggttcttcgccgcgcggcagctccaggcgtatgacgttgtgcgggtttctttccaaaaacgccgcgcgctccgcttcactgatgatgtcatacggcggacaggtcagttctttcgcttctcccgccgattttgtgtaccgcatggcatgaaatgcccgaatgtctgccatcgtggtgcctcctttagatttcactttttctcattataacggcaaagcactcttgcgtcaagaaaaaagcaatacaacatgaaacatcctcgccgcagttcaagtccgaaaacacttcacagcccggctgttttgtccgtattccccgaccgttcgaataaaaacctgcttcttaaaagcgcaagaacaaaacgctgtgcggcggcatttgtaaggttccgcccgcagcttggtccagaacgtttgactgggtaaatgaggagggaggcaacacggtgtcactggagaagagcaccgcctcgctgcaaggtccaaaggaagagaagtccaccggctttttgcggtgaaatgcggcgttcaccaccgtggcggacacccgaccctctcgatccacggtaataacggcttcttgagacgcggagcacagacgattacccatgtgccagcgattcatccaggagaacacttgtccttgcgctgtcaagctcacgtgattcggtttcacacacagcattccctcgttgattgcctgaaagtgacacgcaagggctatcccgcttttttccgcctcttccatcaacatgtgcagaaccagcgccgcataaataccgtcggtaacactggaaggacggtaccaggcataccacacattccactcgtccatggaaatgcgtatagaaggctccagccactgccgggactggtgaatcagctcccgcatccgggagacagaagccatgcaccggttatattcctcctctacggtggaaaggtcggtgtaatgggggtcgtagccataatagtgctgggaaatcatctgagaaatcccggcaagcggcttggctgaaaattctgcccattccttgttaggatagggtcccgaggagcacaggctgagaccgggtgaggcctccagcatttttttgccattctccagtgcgatctggcagtacccggcaggagtgttgtcgccctccatgtgaccgtaaccgaattcgttacccaatgaccaaaactgcacgttgtaaggctcttggtgaccccgattggctcggagttttccgtagggggttgagacatcgccgttgcagtattccacccaagcggcgttctcatcgggggtgttccaacaggggttgatggtgataaacggctcggcaccgatttctcgacacaaggcgataaagtcatcggtattcatctcgctgaaatcgtagcccatggtgtgaggttgagtttccagacccaaataagactggaacggcgcacgcatatccgccggcaaaaggccgtccatccagttgaattccccggcaaaattgccgcccggccagcgcagcaccttgatgcccaaatccttcatggcttccaccacatcgcggcgcattccgtggaagtgatccttgggcagcaaagaaacggctcctacgcagacataacccgcattctcccagcagattcgcagatcggcatcagggtcagcggcctgcggggtgagctccacctctaaacgggtccaatcgtcgccgccacctacagatgtggcacggcagtagacgttctttccggttcgatctgtcaatgaaaccgtaaacttcaccgattcttgggttttaaccaccattccgaacagatacggttgcccttgggatattgtgatgccatgctgacccatgccgacagcttccccgcagtaggggttgaagataccgacggaattacattcgagggtccgcttcatgtggtagccttctccgtggcgggtgtagggttcatccaaggcaaacacgccacgttcccccaagggaaaccattctatggcgcagccctcgcaagccgtgggcttcccggcgaactttcgattgcgaaccatctgggcggataggccggtatagatacaggagcgagtgtgctccagattgcagccgaacaagtagggcgaaaccagtaaatccgcaggatcgtcccggcgtaaggtgagaggtgtggcctgagctgcttttccatcccaatcgacggcctcgtccagattgctgctgcgaaccacgttcatgagttcgccgctgagaagctccacaacgctgacgcgcagctccgcagccacacggctgaaaagcgtcacgtcgggcaggcttttgccacgttcccacttagagaccgctttatcggttacattcagtcgttcggccagttgagcctgagtaagacccatggccatcctgcgccggctgataaactgtcctatttttgataaattcataaattttcctccccttaggacttttctttagcatatcatagtccacccgcacaagcaaccgaccgacagttgagtaacatggagcgaaaaaatttctctgatacttttatggaacgcttcttccgtcacgtcggaaaagaaaaaacgggagtgctcccgaacatcgcctcgcagttaaggcagaacgcggttgcttattttgcacttattttcaaagggctgcactgtattctgcttcgttttttcgcccgggggtacctctttaccgctttgcaaaaataaaagcttttccgtgcgcaaaaagcttgaaacgcaacgggggatttggtatgatggacgtaaataagccttgaggggaagggctgcacattgtgtgcggcgtgcgccctaaattttgggaaggcggttggattgagatggaaaaaagcaagcgaacgtttcgcggcagttacccggcgtatgccctgacctatttcttcttttactggagcttgggcgtgtttacctcggtgctgtctatgtatctgacgggcatcggcaaatcgaaagcggagatgtcctttatcatgtcggcttcgagcttgttcggcgtggtgctgatcccgatcgtggggtatatcaatgataagctgcgaaagccgcggcttatctgtacggtgatgatggcgtgcgtggcggtgttcggtattctgtttgcgttggtgcgcgaaacgatgctgctgttccttttaaacggctgcatcatggggtttatctcatcgctttcgccggtgagcgagcgcatggcaacctcgacgaagtaccgctacggcaccattcgtatttggggcacgttcggttatgcggcggccgtacaggtggcctgcgccatgatggaatttacgagcccgcagctgatttttgtttcggtctccgtttcggcggtgctggccattgtgggtttcctcggcacggacgacatttcgtttacggatacggaagcggcaaaggctgcggcgggcaagcagttttcatttctctgtgcgccgatgtacattttgttcgtcatcatcgggtttgttttttcgggctgctcaaatctcaatatgacatatagccccattttattgcaggagctcggcatgccgacgggtgcggtgggcacagtgctgtttttcagtacgattgttgagctgcctgtcattttgttttcgtacaaatttatggatcgcttttcagggcgcacgctgatgcttttggcgtttgctattatggtggcgcagtttttgctgtacgccacggcgccgaacgcgtttgttgcggttgtgaccatgctggttttgcgtgctatcggttctacgctgttcgggatgatcttattgaagattgtgcgcggcgttgtgcaggtgcgttccgttttcacggcactgggcgttatcagcgctacggacgcgatgagtgccattttgatgcagaaccttggcggtattctggtggaaaacacgagtatccgcatcttgtattttgccatggcgggcctgatgatgctcggcatgatcctaacgctgttcctgcgcgtgcagaacacggaaaaggtgttttcgtaaaaatttccccgcagcttcgtgaaatttccgacgtgaagctgcggggaatttttagaagccgaacacggctgtgtaatctaaaacggcgtgcacgaggacggggatccacagggagccggatttttctttgaggtattggaaaaggcagcccatggcgacaagccccgccatttgtgagcatacaaaacgcacaaggtaagacgcggtgatcgctccgaaatccgcataggcgaacacgtgcatggcggcaaagagaatgtttggcacgaggtagcgaacggcggcgggctcgtcccgcaaaagccccacgcatacgccgcgcacgacgaattcctcacaaaacgcgatgaaaacggtgtagtagaataggctgtacagcacggtgattttattcggctttacgatcagcgctgcggccgtgacgataagcaggagaaacagcaacaaaacagcgatttttcttgttttgcctttggggacggtcagttgcatcgcctgcacaaagcgctttttgcagaaaacgagcgcgaggaaaacaagaaaagcgggcacggcggacgtgagcagattttgcgcaaagagctgcggcaggtacgaggaagccgcccgcacggagagcagcgtgcctttttgtttttcggcgtatatgacccatgcggcgaaaagcatatccgcggcacaaatcaaaaacacggcaagaattttcagcgcaaatttgtcttttgaagacgctttatctaaaagcatagttttctcctttcgcggcccgagcagccgcctttttcgggtaaattatagcacggctttcagaacgtgacaagttcactaaatttctgacagtgaattttacggggggaattttctttttactggaaacgggcgggctgctgtgctatgattaaagtatcaaaaggaaggtggttatatttatgatattggaaagagtcacgccggaaagcgtgggtattcattccgaaggcatattgaaatttatcgatcttgcagaaagcagagggcttgagctgcacagcatgatgctgctgcgccacggcaaggtgtgcgcagagggctggtggaagccgtataacccggcgtcgccgcacatgatgttctcctttacaaaggcgctgacctccacggctatcggctttgcgtgccaggagggagcgctgtctcttgacgatcgcttgagcgagctgttcccggacaagatgccggaaaatccgagcgaaaatctgcttgcctgcacggtgcgcgatctgctcacgatgtcctgcggccacgagacggagatcaatacgttcgatgtgaacgagccggattggattaagaattttctttcgcatgagtttaaatataagcccggcacgtgctttatgtataacaccgccggcacgaacatgctgtgcgccgcgctgaagcgccgtacgggtgaggatctgttcgagtaccttacgccgcgcctttttgagccgctcggcattgagaatattgagtgcttccgtctgccggacggcatcgaaatgggcggcgcgggcagccgtctgaagaccgaagacatggcgcgctttattttgtttgtttcccggcacggcaagtgggagggcaagcagcttttgaacgccgaatggttcgacatggcgagcgcaaatcaggtctcaacgatcagtccggcgaataatgcggataatcccgactggcgctgtggttacggcttccagttctggcgctgcgtgccggagcatgtgttccgcgcggacggcgcgttcggccagtacggcgtggtgtttgaggacaaagacaccgtgctcattttgcagagttcttcctccaatcagcaggagcagctgacctgcgcgtgggaggcgttgctgccggccatcacggacgaggagacgctgccggaaagccccatggcgcacgttttgaagaagcgtttggaaaaagcggagatcacgccgatgttgtcttcccgcaacccgtggtccgaaaaagaaattgagggtaagaaattcgcgtttacggaggaagttccggggcttgtcgatttcatcggcggtgtgtggattgtggccccgcagggcggtgtgacaaagacgctgcgctttgaatttgcgcccgaaaaagcaaatctcgttttcgagcaggataacggcgaatttacggcggagatcggccttcagagccacttcacgagctttacgctcggcggccgtacctacggcgctgtgggtcgctggcgcagtgacaagcgctttgagctcgaagttcgctgtgcggaatccgcaggcggcagacgaatgatcttcacatttgagggtgacgtgctcacgctggagacggaatctacgatggcaatctccggcggcattgcagaccgcccgtacaagcgctacacgctgaaagcggaataatttcaaagaaggatatggagccgtgcgcagaaggaaaacctgtttgcgcacggcttttctttgcttaaaacgtttgactaacggcctgaaatatgctatactcttggggtattgaatattgggctgtcgccaagcggtaaggcaacggactttgactccgtcacctcgtgggttcgaatcccgccagcccagccagaaaaaaggactttgcgttttgcaaagtccttttttcaacaagataaatcccttggggatttgtgaaactgccctttgggcggtgaagtgtcttaggacgtttataaaaaggaaaaccgccggtcttcgcaatcatctcgcgcagcagctccgggtttcctggcatggggcacgggcgcaggtggttctcgttgaacggctggccatcgtggtacgccatgaagagcggcgactgcaggacttcgagcagtgttttttcgcgaatgttggaatcggaatagcggataaacacgcacgggtcggcgtcgccgccggtgtagataggtatacgccgagctctttgccctgcgtgatggcagaaattatagagaaaacaaaagcgccgggcttccatgaaagctcggcgcttgatttattgatgaaaattatacgaactgggacgggtctacacgggtgccgttttggtagacctcaaagtggcagtggtcaccgaaggaatagccggtatcgccgacatagccgatgacatcgcccttgttgacccactggccttcgctgacggcgacggagctcatgtgtgcgtacagggtggaataggtgctgtcgtggtaaatggagacgtagtagccccaggaatagccccaatcatcggagccgtttgcggtcataaccctaccggagcgggatgccacgatctgcgtgccgcggcttgcggggatatccatgccgtagtggccgttgccgaatgcacagctgacgccggtccagcccggaacaggccatgcaaagctttcaccggaatagtcatcgtcataagacggctgcggcaccggggtcggggtcggggtcggctttacggtcggcaccggggtcggtgtcggggtaggcataacgttgccgttatcgtccacttcttcttcaggcacgggggtcggcgtaggtgtgggctctacggtcggtaccggggtcggggtgggcgtggcttttgcctgtgccatctgctgctgcatttcggcgatctttgccgacatcatgtttgcgagcacgtattcttcttcctcggtgcgggaaagctcggtctcggcactgctcttatcggagcgaatctgctcgagcagggcggtgttgtcgctttcgagctgctttaattcttcttcgcttgattcatacagctttttggcatcggcaagcgcggtcttttccttttcaagctcttcgcgctgtgcctttgtctcgttcatgtacgctgcaaccgtatcgatgagctgcttatcgtggcgggtgatggtggagacggcctctgcgcgcatggagaaatcatgcaggctttcggaattgaagagaatctccagcgtaccgacggtgcagccggcggagtacagcacggcgagacgctttttcagaagctccatggtatcggagatctgatctgcggaatcgctgagctctttttcgagctttttaatgctggtgttcagcacggtgatgtcactgtttgcggtatcgatctgctccttgatggtatcaatcttttcggagagcagggtaaggtattcggttttatcagcctcctgagactccagagaggagattttgttttcgaggtcggcctttttgttggcgagctcggtctgcttggcttccatatcggctacggtatcgtcggcgtagctgagcggtgcggcacagagcaacagggcggaaagcacggctgcagtgatgcgcttcctatttttagaaaacagcttcaacggaaaaacttcctttcagcaataaatttcgatttcataaaagggcatacgaaccccttttatacacgagactattctacatgataactttcggtttttaattccttaaaagaattaaagcgcaaattactacggaaaaagaacagatttatttcagaattcctacaagggagcccaagtcggtatcagcttcgagataactttacggggaaaaggagggcacttcaaaggaaaaagaggatgcgcgaaagcgttttacttgacattttgccgcgaaacgagtacaatatcagcggttattcgttagtttgtttaactaaatttatcgaaaaacggcacaaatgggcgaaaggagtgtgcagcatgtccggcttttctgcgaaagcaaacgagcttctggtggagatctatcgcaatgtgcagatcttggagcagaacgaactgaaaaaacaacggctgaacatctccatcaacgagatgcacatgatcgagctcattgccaaaggcaaaaccggcatgacggtcagcgagatcgcccaacaactcaaggtgacaaagccctccgttacggtggcggtgaacaagctggtgcagaagggctactgcgaaaagcagcgcctgcccggcgatggccgcgcggtgcaggtaatgctaacgcccgagggcaaaaaagtggaggcgttccaccgccgctgccaccggcgcatcattgcggaaatctgcgaggatctttcggaagaggagcgcgaggagcttttgcgcaccatgacgcgcatcaattcttattttcagacgaaattgtgatttctttaaatttctttcaatgatttgccacgcaaatcattgggagaccccttaattgggtctcccacacctcaacagtccactggactgttgaggttcccgtcctgatttttgggaggcaaaaagatttcgccatttgcgaatgacgacttagggcgctgccctaagaacccgcaagttttctgaagaaaacttgactaaagacttttaacaaacattcactttaataaggttattatattgcctttacggtgctgccgaagttttttcggccggaaaggaaagaaaactatgagctttaaaattttaggtacaggcagctacgcgccggaacacgttgtgacgaacgacgacctctctgcgcttgtagacaccaacgatgaatggatcacacaacgcatcggcgtgcgctcccgccacatcagcgagacggaaacgaatgtggacatggcggtgaaagcggccgagcgcgcgctggaaaatgcgggcatctctgccgatgagctcgacctcatcattgcaacgaccatcacgggcgacacgctttctccgggcacgggatgcatggtgcagaaccgcatcggcgcgcactgcccggcgtttgaccttgcggcggcctgcagcggcttcctctttgcgttggaaacggcggcgggcttcctttcccgcggcgcgtataaccgcgtgcttgtcgtcagcgcagagcgcatgagcggtatcatcgactggacagaccgcggtacgtgctgcatcttcggcgacggcgcgggcgcggcggtgctcggcaagggcgacggccttgtggcctctcacctgatgacaaagggcggcgacgacgtgatcacaattccgacgcgctatgaccgttccccgtggtacaaaaatgagattagcgagattacgtccgtacacatgaacggccgcgagacgtacaaattcgccgttatggcgatgtccgacaacatcaaggatctgatggcttcggcgggcgttgcgggcgaagacgtggcgcttgtcattccgcatcaggcaaattaccgcattatcaacgaagcgcgacgcagaattcccgacattgcgccggagaagttctgcatcaacatcgaccgctacggcaacacgtcttccgcgagtgtgccgatcctcttggatgagatgaaccgcgcgggcaagattcacgagggcgacctcatcattctggcggcattcggcggcggtctttccgcaggcgccatgatcatccgctggtaaaaacacgacatacagtcaaaaataaagaaaaaccgaaacgttttcaacaggcaaaagccggaaaggggaaaacattatgatctcaacaccgatttgtgacatgcttggcattcgctacccgatctttcagggcggcatggcttggatctcggacggcaaattagcgggcgccgtttccgaagcgggcggccttggcattatttccgctatgaacgcaaacgcagagtacctgcgcgagcagattaaaattgcaagagaactgaccgataagccctttggtgtgaacatcatgctgatgagcccgttcgcggacgaggtggcaaaggtggtcgcggaggaaaaagtggcggtcgtaacgaccggcgcgggtaacccctccaaatatatgaaagactggcttgcggccggcattaaggttatcccggtcgtggcatccgtcagcatggcacgtctgatgcagcgcgtgggcgcctgtgcggtcattgcggagggcggcgaaagcggcggccatatcggcgaaacgaccaccatggcgcttgtgccgcaggtgacgagcgcagtgacgattccggtcatcgcggcgggcggcatcggcgacggccgcggcgtggcggctgcattcatgctgggtgctgtgggcgtgcagctcggcacgcgcttcctggttgcaaaggagtgcggcgtgcaccagaactacaaaaacaaggttttaaaggccaatgatattgcgacgatgtctaccggcaagcgtctcggtcacccggtgcgcagcatcaagaacccatacacaaaggaatattttaagcttgagtacagcaatatttccgacgaggagcttgaagcgtacggcagaggctctctgtaccgtgcggccgtggagggcgacgaaaagaccggctgcttccttgcgggccagatcgccggcatggtgaacaaagagcagaccgcaaaggagatcatcgaagagatcttcacgcaggcggaagacgtgctgaagggggcgaccaaatgggtaaagtagcctttgttttctccggtcagggcgcacagtacagcggcatgggcaagtccctttacgagcacagcgcggcggcgaagaacgtgtttgacacggcggagagcatccgccccggcacgaagaaccagtgcttctccggcaccttggaggagatcagcatcacgaaaaacacgcagccgtgcctgttctgcgttgaccttgcggcggcggaagcgctgcgtgaagcgggcatcacgcccgacatgacggcgggcttctcgctcggcgaagtggcggcggtgacgtttgcgggcatctttacaacggaagagggcttctcgctcgtcacaaagcgcggcgaagcgatgcaggcggcagccgagcaggcagacagcgccatggcggcggttttgaagctgccgaacgaaaaggttgaggagctgtgccgcatgcatcagagcgtgttcccggtaaactacaactgcccgggtcagctcgtcgtggcgggtctgaaaacgactttgccggatttcctttccgacgttgccgcaaacggcggcagagccgtaccgctgaatgtgagcggcggcttccattctccgtttatggagagcgcttctgcgcgtctgcacgacgttttggagacgatggacgtgaaggagccgaccgtgccggtctacgcgaactacacggcggagccgtacacgaaagaaacggcaaaagaactgctgacacagcaggtggcgcacccggtgcgctggcagcagaccgttgaaaaaatgattgaggcgggcgtggatacgtttgttgaagtgggcgcaggcaaaacgctgtgcggcctcatcaaaaagacgagccgcgcggtgaaggtatataacgtggaagacgcggagacgctttcggcagcggtgcaggcgatccgtgcagaaggagaaaacgcatgagcttaaacggcaaaacggcgctcgttacgggcgcatccagaggcatcggccgcgccattgcgctgcgccttgccgaagacggcgcgaatgtggcggtcatctacgcaggcagcgccgataaggccgaagctgttgtgaacgaaatcacggcgcttggcgtaaacgcaaaagcataccggtgcaacgtggcggattccgccgcggtgaacgaaaccgtgaaagcggtgacgaacgacctcggcaagattgatattctcgtcaacaacgcgggcatcacacgcgacggcctgatgctgcgcatgaaggacgaggattttgatgcggtgctcgacacgaatttgaagggcgcgttcaacatgattcgcgcgtgctattccggcttcatccacaagaaaagcggcagaatcatcaacatttcctctgtttccggcattatgggcaacgcagggcaggcgaattattccgcttcaaaggcgggcgtcatcggcctgacgaaatccgtggcgcgcgaactcgcttcccgcggcatcacctgcaacgcagtggcgccgggctttatccagacggacatgacagaaaatctcggcgacaacaacccgcttttaaacagcatcccgctgggcagaatgggcaagccggaggatattgcggcggcagtggcgtttttggcttccgacagcgcggcgtacattacgggcgaagtgctgaaggtagacggcggtttggctatttaaaacctgtgaactttgagattttacgggcttgaaaaagttcttattgattaagttttcaacgtaaaaagataaatcggttcaaaactttcaagagaaaggagtgcttccgtttcggaagcctgaaaaatatggaaagaagagtagttatcacgggtctcggcgcagttaccccgatcggcaacgatgtggatacgttctgggaaaacctgaaagccggcaagtgcggcatcacgaaaatcacgaagtttgactccacggactttaaagcgcatgtggcggcggaggtcaaggattttgacccgctgctgtacatggataagggcgaagtgcgcaagaacgacccgttctctcagtttgccatcgcggcggcaacgcaggcggtgaacgacagcgagatcatgggcaagatcgacccggagcgcttcggcgtgtatttcggttccggtatcggcggcatccagacgttctccaatcagatgacggcgctgaacgaaaagggcccgcgccgcgtttccgcgtactttatcccgatgctcattgcgaatatcgcaggcggcaacatcgctattaagttcaacgcgcagggctcctgcctgccgatcaccacggcgtgcgcgacgagcaacaacgagatcggtgaagcgtaccgtgccattaagcacggctatctcgatgccatcatcgccggcggcgcggaagcagccatcgtccctgtgggcgtggcgggcttcggcaatatgacggcgctgaccacctgccccgacccggaagacgcttgctgcccgtttgataagcgcagaagcggctttgtcatgggcgagggcggcgcggcgctcattctcgaagaatatgagcacgcaaaggcgcgcggcgcgagaatgtacgcggagatcgtgggttacggcgctacggacgacgcgcaccacatgactgccccggatccggagggcaacggcggcgcaagagccatccgcatggcatacgaagaagcgggcgcggatcttgcaaacgagaaaatttacatcaacgcgcacggcaccagcacgccgctcaacgagcgcagtgagacgctggccattaaaaaggcgttcggcgagcacgcatatgacgttgtcatcagctctacaaagtccatgacgggccacatgttgggcgcggccggcgcggtggaggccattgcttccgcgctggcggtgaaagagggcatcgttccgccgaccatcaactacaaagagccggatccggactgcgaccttgacgtctgcccgaacgaagcgagaaaggttgaccttgacctcgccctgtccgtttccctcggctttggcggccacaacgcttgtattgcaattcgcaaggttttgtagtaaaatatggggtacgacaccgcagggcatctgcgggaatacccggataaataccgcttgattcaacggagggacgtttgtgaatattaaagacattgcggctttggcggagatcgtcaagcagaacgagctgacgaagctggaaataaacggcgaaaatatcgtcattgagcgcgccgcgcaggtcgtgcaggcggcaccgatcctgaacgccgtgcagcccgccgtgccggagcagatgcacacgacggagcccattgcggaagtgaaggagaaagagggcgtttatgtaaaaagccctgccgtaggcgtattttacgccgcgccgtctccggacagcaagccgttcgtcgccgtgggcgacacggtgcacaagggtgacacgctctgcatcattgaggccatgaagctgatgaacgagatcaacagcgaaatggacggcgagattgccgagatttgcgtcggcaacgggcaggtcgtcgaatacgaccagccgttgttccgcattatttaagatgaaaagctcccggagcgccgccaaaaaatgcgcgtccccgggatttttccgtggaaaggaatacgttagatgaacaaggaagagatcaaaaagatcctgccgcaccgcgagccgatgctcctcgtagacgaagtggagctcattgacggcaaagcgttcggcaagtgccacatccgcggtgacgaatactttttgcggggccattttccgggcaaccccatcgtgccgggcgtgattcagtgcgaaatgctggcgcagagcgcctgcgtgctgctcgcagacggtgcatcggagggcatgaccccggtgtttacgagcctcgataaggtgaagttccgcggcatggtgaagcccggtgatacgctggagaccgagtgcgagctcgtgcgccagcgcggcatgttctattttgcaaagggtacgggccgcgtaaacggcaaggtctgcgtttcggcagagttctcgtttgcgctcgtcaaggcgtaagcccggcggaaaggaacaggctatgtttacgaaactgcttatcgcgaaccgcggcgaaatcgcggtgcgcattattcgtgcctgcaaggaaatgggcatccgcaccgtggcggtgtattccaaggcggacgcggagtctatccacgtggcgctggccgatgaagccatctgcatcggcgaggcggcggcgaaggacagctatttgaatcaggagcgcatcatcagtgcggccattgcgtcgaaagcgcaggccattcaccccggctacggctttttggcggaaaatgcttcgtttgcgaagctgtgcaaaaagtacggcatcgcgtttgtgggcccgtccggcgaactcatcgaccgcatgggcgataaggacgccgcacgcagactgatgaaagcgtccggcgtgccgattattccgggcagcggcattttggaaaatgtcgacgaagcaaaaagggcggcaaaggagatcggctaccccgtcatgttaaaagcatcggcaggcggcggcggcaagggcattcgacttgtaaagaccgaggacgagctggaacaggcgtttaaaacggcatcaagcgaagcgcagcaggcgttcggtgacggtcgcatgtacatggaaaaatacatttatccggcaaaacacatagaagtgcagctgctctgtgacgagcaggggcatgtggtgtgccttggcgagcgcgaatgctccattcagcgcaataaccagaagctgattgaagaatccccctcgcccggtgtgacaaaggaaaagcgcgccgagctgtttgaggcggcgacgaaagcggcgaaagccgtgggctatgtgaacgccggtacggtggaatttttgatggaccgcgacaagaatttctattttatggaaatgaacacgcgccttcaggtagagcatccggtttcggagctcgtcaccggcaaagacattgtaaagtggcagatccgcattgcagcgggtgtagagcttgactgcacgcaggcggacattaaagtgcgcggcgcggcgatcgagtgccgcatcaacgcgggcggcgtgggcaaagtgaatttcctgcacattccgtccggcccgtgggtgcgctttgatacgttcttatatcagggctacgaggtgccgccgttttacgattccatgctcggcaagatgatcgtgttttcttcgacaagagaagaagcgatacgcaagatgcagtccgccttgtgcgagcttgtcatcggcggtttgccgaacaacattgaagatcagatcgatattatccgcgaccccgttttccacagcggagattattatacggacttcatcaaaaaccgtgagggctgaggaagttcatttaccgaagggagtagaccgttatgaatttgatgggtctgttccgctcgccccagaatgagctggaaaagggcggaaaacaactgaaaaacccgcaggaggagcagcacgagatcacaatgacatgcccgaagtgcggcacgcagaccccggtctccgagctttgggacgacctgaacgtctgccgctgcggccaccatttccgcatgacggcacgccagcgcatcagctttttggcggacgacgatacgtttacggagctcgatgccgacatgacgagtcatgacattctggagtttccgaactacgaaaataaactgaaaagcgcgcgccttgcgacccgagaaaaggaagccgttgtctgcggcaccgcaaaggtaatgggagaggactgcgccgtgttctgcatggacccgcattttatgatgggcagcatgggcacggttgtcggcgagaagatcacgcgtttgtttgagtatgccacagagcaccgtttgtctgttatcggctttacggcggcaggcggcgccagaatgcaggagggcattttgtctttgatgcagatggcgaaaacgagcggcgcggtacgcctgcacagcgatgcagggctcttttatctcactgtgttgaccgaccccacaacgggcggcgtgacggcgagctttgccatggacggcgacgtcatcatggcggagcctgacgcaatggtcggttttgccggtgcgcgtgtcattgaacagaccatccgcaaaaagctgccggagggcttccagcgtgcggagttccttttggagcacggctttattgatctcatcacgccgagaagtcggcagcgtgaagtgatcgcgcggctcctgcgtctgcacaacgagggcaaacaggatgcctgcgtacagcaggcggatgcaggtgagacaaaggaggctgaagcataatggcaacggcatacgaaaaggttcagcttgctcgcggcaagggacgcccgagcggcctcagcttcattcagaatattttcccggatttcattgagctgcacggcgaccgccgttttgcggatgaccccgcggtcatcggcggcatcgcgacgctcggcggccgcgcggtgacggtcatcgccatcgaaaagggcgcagacacaaaggataaggtctaccgcaacttcggttcgccgaacccggagggctaccgaaaggcgctgcgcctgatgaagcaggcagagaaattccatcgcccggtgatttgctttgtggatacctccggcgcgttctgcggcatcggcgcagaggagcgcgggcagggacaggctattgccgaaaaccttgtggaaatgatcgggctgaaaacgccggtcatctcgattttggtcggtgaaggcggcagcggcggcgcacttgcgctggcggttgcggaccgcgtgtggattttggagaacgccgtgtattccgtcgtttccccggagggctgcgcgagcattctctggaaagatgcaaagaaagcgaaggaagccgcagagtgtctgcatcttaccgcgcaggacatggaaaagcttggcgttgtggaacgcgtcatcagtgaatccggcaaaacgaaggcggagcttttcagccgagtgaaagagatgcttgccgtgcagacggacgagctgtgcaaaaaagacaccgagacgcttttaaaagagcggtatgagcggtttagaaagtactgagataagcaaaggcggatgaaaacggttaagcgttttcatccgcctttttgaataataaaataggcggtccggaaagaccgcctattcgggagactccctaattgggtctcccacggacggaacgtccactgaaagtttcataacaatgcgaagcattgttttctcccaatcctgatttgttggtaggcaaaaagtatttcgccgttttttgcgaatggcgacttagggcgctgccctaagaacccgcaagttttctgaagaaaacttgactaaagacttttaaccacggttgccgtcagctcattccccaaacacatgcttcacgttttcctgctcgaactgtttgttgtagagatcggcgtagtagcctttgttttgaagcagctcttcgtgcgtaccctgctcgataatcttgcctgcgcggacgaccaaaataaggtcggcatggcggatggtcgagaggcggtgcgcaatgaggaacgaggttcggttttcaagcagcgtcgaaatggcgtgctgaatgagctcctcggttttggtatcgatggacgcggtggcttcgtctaagacgaagatgcgcgggtcggccagcacggctcttgcaaacgagatgagctgcttttcgccggtggacagctggtcgccgccctcgccgacgtcgctgtcgtagccgttttccatgtgcatgatggcgtcatgtgcactgacgagctttgcagcggcctcaatctcctcgtccgtcgcgtctaagcggccgtagcggatattatcgcgcacgctgccggaaaagaggtgcggcgtttgcagcacgtagccgatgctggagtgcagccacagcatggagcgctcgcgataatccttgccgtcaatgaggatgcggccctcagtaggctcaaagaagcggcaggcaaggttgacaagcgtgcttttgcccgcgcccgtttcgccgacaatggcgaccgtggtgccggcgggaatatcgagcgaaaaatgttctaagacgttttctacgccgtccgggtagcggaatgtcacgtcgtcaaacgtgatgtgaccctgaatcggctcccagttttctcttttcgggtcgaatgcggtgccgtatttttcaatgacttcaggcgtatctttgatgagcggctcgcgctccaaaagggcggagacacgctcaatgttgacctgcgtggaaataaaattcgagatggtgcgcgcaagctgctgtaccgggtcggcaataatcaaagcatagttgatgaacacggtcatttcgccgacggtgatgtcgccgaacagcaccatgttgccgccctgattcaggaccatcgcaacgccgatggcggtcagaaagctgatgatcggaatatacacggcatttaaccgcacggcgcggatcgttgtggagcgcatgtcctccgcgactttttcgaacgctttgtcgttcttttcttcgatgacgagcgttttggatgtttttgcgccggagatgccttcgttataatgacgggtgacctcggcattgatggcgcgcacgcggcggttcactgccaaaattttcttctggaacacgaccgtgatgacggcgatgatcgggataatcgcgatgaggatgagtgcgagcttccagttgacgaacagcatgatgacaacgcagccgagcacgtacatggagctccagaaaatatccacaaggctccatgccaaaaccgtgccgatcttgccggtatcgctcattaaacgcgccataatggtgccgacgggcgttgtgttgtagtaggaaaagtcgagcgtctgcaaatggtcgaaaagcttgcgctttaagtcgcggcctaagtacatttcaacctttaaggcgtagattgccattaaaatggttgtaatggtctgcacgacgaccatggaaaggtaaacggccgtgaagggaatgaggccttccgtcgtgcgcggctcgatgaaattatccacggcgtagccggaaaaaagcggctgcaccatgtcaaaacaggcgccgaggatcatcagtgcgatgattaaaatcatctgccacttatacggggcaaggaacggaagcagctttgcccacgtttgtaaggatttgtttttgattttcatatcggtaaataccccgtgcgcggcttaagtagccgagcgctgtgtgtcgtaaatgcgtttatagatgccgtcttccttcgagagcgtttcgtgcgtgacgcgctgcacgatgcgacccttatccatgacaatgatctggtcggcattcatgatggtcgtgatgcggtgggcgatcaaaatcgttgtgccgcgcacgtttttgttgatggattcgcgaatcttcgcgtcggtttccatatccacggcggaaagagagtcatcgaaaattttgatcggcgtgttctgcatgagcatacgggcgatggcgacgcgctgtttctgaccgccggagatcgtcacgccgcgctcgccaatctgcgtatcgtagccttcggcaaagcggtcgatggtgtcgtcgatgacggcaaggcgggcatacttgcgcacgctttcaatatcgtggcgattggaaccgtccgaaatggtgtccttaaagctctttgagaacaggaacggttcctgcaaaacaatgccgatattgccgcgcaggtgcgaaagcgcgatgttgcggatatccacgccgccgatggtgatctcgccggagccttccggcagctcgtataggcggtctaaaaggtaggtcagcgtgcttttgccgctgcccgtggagcccaaaatgccgagcgtggtgcctgcgggaattttgaggtcaatgtcatgcagaacttcgccggaagtgccgtaggagaagttgacgtgcttaaacacaatgtcgcggtccatgggcggggtaacgggggtttccgcatccttttccggctccgcgtcgagaatttcaaaaatacgcttggagctgatgccggtttttgaaagctcgctcaaaagacgaccgaggctgcgtgtaggccacacaagcatggaattgtacgcgacgaacgcgaggtactcgccctccgtgatggcgccgtccacgacgaacacgatgccggcggcgatgatcgtcaacacctgaatgccggaaagcaaatcgccgatgccccagttgacgcccatcacgtggccgaggcgtacccagaggtcggagaagaggtcgttctgcttattgaatttatctttttcaaagcgctcgcggccgaacgcgcgcaccacgcgcacgccggtcaggttttcctgcaccatggcggtcagcttgccttcggcttcatccgcaatgcggaagcggtcgcccacgatgacgaagaagatcatggaataccccacgacgatcgggataaaaataaaggcgataagcgcgagctttacgttcatggagaacatcagggcgagtgagacaacgatgagaaaaaccacgcgcacaagctccatcatctggtcgttgataaagttgtgaatgaggtcgacatcctgcgtgcatctctggatgatgtcgccggtctggtttttgttgtgccatgcgtagggcaggcgctgaatgtgcgaaaacagcgtgttgcggatcttcgtcacggtgccctcgcagccctttgccatattcatgcgcgaaaggtacgtggaaatgcccgcgagcaccgcgaacaaaagcgacgccaaggcgcatagaatgagattttgacgtaagaaatcccgcccgcccatgttttcgatctgtgttgccaaaaacgaagggaggttgaacggggagtcgttgatgacggagtctaccgtcacgcggatgatctgcggtgtcatgtacccggcgaagaccgagatcgccatggtgagcagcgccagcacaaaattgtggcgcagtccctttgtaaaggagtaaaaccgcagaatggtcgtgcgtttttcctttttcacaatataccggttgcctttccggtgcgcattttgtctaaacaaaaaaggagaagtcggccacacctcaagctgcttcttgcccgcgcggtttcccgacggtatggacatctttttgcgcacctcacactgtgccgggtgtttagtatcggcacagaaaaacgggtcgaagccaaagcttcgagcccttcacagcgtgtatgccgcaaaaaccgcttgttttgtgtcccgctgccgaacgccatgaacacacaggtttttacggtatgagcccggaaacagacacggctttccgaacccatagatagtatgacggcgatttaactttaacatcacagatacaaaaagtcaatcgtgttgagcaaaaattttgttagaaaatataagtttcgtgtgcggcgggcgtgcaacaagggaaccgaatagactttttagcgctaaatggactgaaaattacagttttgggggcgtctgcgaagaaaatttacaaatacccccttgctattttgaaacatgcggattataatatgaatatatctggtattgaaaaccatataaaagaaaaataaaaaacagttttaaaataaagaaccggggcaggtccccggagaaagggtgaaacgtatggatatgcagacggcatacgccggttacggtgcaagaaaggtttggcataaggaagacaggatgcggctgtctttgccgctgtattcgcttggggaagagatcttctccgctgtgtcacacggtgtgggcgcgctgttcggtgcggcggcgctcgttatgttattgtggttctgcgaaaagagtcttgtgaacgtcgtcagcgtcagcattttcggcggcacaatgattttgctctacacggtctccaccctttaccacgcattgaatgtgaaccgcgcgaaaaaggtgtttcgcgtgctcgaccactgcacaatctatctgctcatcgcaggcacatatacgcccatcacgctgtgctgcattgagggcaggcagggcatcgtcatgttcgcggccgtgtgggctgcggcggtgctgggcattattttaaacgccgtcgatatggagaaattcaaggtcgtttcgatgatctgctacctgatgatgggctgggtcgtcgtactggcgtttaacacggtcgcggcaaaaatgccgggtgtgggattaaactgcctcatcgcgggcggcgtggcgtacaccgcaggcgcggtgctgtacggcctcggcaaaaaagtgccgtacatgcacgccgtgtggcacctgtttgtcttagtcggcagcgtgctgcatacgctgagcgtgtttacggtaattatttgataattgacttttctataaaaatcacaaaccgaaaggattaagctgcatgaaggtatccgaatttacatttgattccagcacggcacataacaaaattttcacccgcctgtatgagccggacggcgaaccgaaggctgttttgcagatttcgcacggcatggcggagcatagtgcgttgtataaaccgttttgcgaatacatggcgcagcgcggctttgtcgttgtcatcaacgatcacctcggccatggccgcagcgtgacctccggcgcgctctacgggcatttcggcgaaaagggcggcctctataatgtcgtcgaggatcagcgcaatttgcagagcatcatgcgcgaaaaatatcccgagctgccgtattttctcatgggccacagcatgggctcgttcatcgcgcgcgaatttgcggccgcctacggcaactccctcacggcagtggtattcatgggtaccagcgcgggcatttcgactgccatgtggaaggccgagcgcacgtacctcaatatgctgaaaaaggcaaagggcgcacgggcgaaaattccgtcgctcgagaagatcgccacgggtccgtacaacaagaaattcaagcccaaccgcacaaattacgactgggtgacgagtaaggaagaggaagtggatcgctttgtaaacgacccgctgtgcggcttcccgctcacggtgcaggggtatatcgacctcggcacgcttttgtacgccatcaacaccgaccagtggtaccgccgtgtgccgaaagacctgccgattttgctcatctccggcgaaaacgatcccgtgggcgatatgggcaagggcgtgcgccgtgtgtttgataaattgaataagaccgggcacgacgtgaagctgacgctttacccgcgcatccgccacgcgctcatcaccgagatgaacagtgcgcaggtctacgaagacctgtatgctttcttctcgtcgcacctgccgaaggcggaagagccggtttacgaaaaagagacggaagcagagcctaaagtttccacagaaacggaaaaatccgttgaaaatcctgctgcggaagaagaaaaagagaccgaagcggcagccgccgaaaaatacgacgacatgccggaagaaaacgcagagcttcccgtgatttgaaaatagaaaagccaagcggaaagtcgcctttgcaccgacgtacataatcgggcaggggcggctttttgcataagaaaatctttttccgcgtatacatagcgcgaaggagggatcgggatgtacggtgttttgagcttgcgttcgcatcgtgtgccgagcgtcggtgcgttttatcgcttgttgcccgcgtggctgcgcagaacggcggccgcagcgctgacgctcggcaccatcggggcgctcggtgcgatcttaacggtcatggcggaggaccccggcgtgcgcgtaccggtcatcatgtatcacgccgttatggacgacgcgtcgcgccttggcaaatacgtcatttcgccggaggaactcgaaagcgattttaagtggctttcggaaaacggctatacggcaattttatccgaagacctcataaactacacggaaaacggcgccgcgctgcctgaaaaaccgattttgctgacgtttgacgacgggtattacaataactacttatacgcttatcccaccgcaaagcggtacggcatgaaatttgtgctttcgcccatcggaaaatacgccgacctctacaccgaaacgccggacaaaagcccgtactatgcgcactgcacgtgggatatgctgcgcgaaatgcagtcttccggcgtggtggaaattgcgaatcacacgtatgacctgcacagctcggacggtgcgcggctcggcacaaagcagctttccggggaatctctggaagactacacgaagcttctcaccgaagatgtgacgctttttcagcagaaagcagaagaaaacctgcaaagtaagcccgtcctgtttgcatatccgttcggcgcagtgagtaagggagagccggagatcatcaaaaacctcgggtttaaggttacgctttcgtgtgaggagcgtgtcagcaccgttacgcgtgccccggaaagcttatattacctcggccgctacctgcgtccctcgggtgtgaacagcgagtcgttttttgaacacattttgaaagcatgatgtaggagggttcatatgccgacaatctatttaagcccgtccattcagccgtacaataagtatttgacagagggcgatgagcagtactggatgaaccgtatcgcggacgacatggtgcccatgctggagcaaaacggcatcaaagttgtgcgcaacacgccgaacacgtcgcttgggcaggcgatacgcgaatcgaacgccgggaattacgatttgcatttggcgctgcactcgaacgccgggccgtcaaatttggcggggaagctgcgcgggccggatgtgtactattatccgtacagcgcttccggcaagcgcgcggcggagcttattgccgatgaactgcggaaaatttaccccgaccccgaccttgtgagcacagtggcgacgacacgtcttgcggagatcacgaaaacgagcgcaccggcggtcctcgtagagatcgcgtaccacgacaacgccgaggacgaagcgtggattagaaataatatcactgtgattgccgaagcgcttacccgcgcagtgtgtgcgtaccttgagatgaactgcgcgctgtgaacgagagcttctcggcgtttgtccgtgttttgacagcggttttgtgggggccgcacgtgctgcttttgattttgcttgcgggcgtgtggtttacgctgcgcgggcggttcatgcaggtgacaaagctgccgggcatgacgcgcggggcattgtgcggcacgcagcgctgcgggggattttccgcatttcagtccttgacggcgtcgcttgccggctcgctcggcacggggaatattctgggtgttgcggcggcaatcctggtcggtggcgcgggcgcggtcgtctggatgtggattgcggcgtttttcggcatgatgaccgtatatgccgagggcgttttggcggcaaaattcggcacgaaaaacgcccccggcgcgatcggctatgtgcagaaggcgttcgggcggcacggcgcaaaaatttatgccgcaggctgtgtgctttcggcgctcggcatgggcaccatggcgcagaccggcgcggcatcgtcggtgctggtgcccatgggtgtgccgcgcgtgcttgcgggcgttgtatttgcggggcttttgctcctttgcgtgcgcggcggcctgccgaaagccgtgcgcgtcacggaaaagcttgtgccgttcatggcggggctgtttttagcgttgtgcgccgcggtgctccttctgcgcggaagccatatccccggcgcggtgcggaatatgctgaaaggtgcgttttcgctgaaagccggtgcgggcggcgtatgcggcatgattttagccatgcgtgagggcatttcacgcggggtgttcacaaacgaagcgggccttggcagcggtacattcgcgacgttccgcacggaaaataagaccccggagcagatcggtacactcggcgctttgcaggtgtttatcgacacaatcctgctgtgcacaattacggcgctgtgcatgctggtgtcacccgtgcgtgatttttccccggaagcggcgctttcggtgttttcgctcgttttggggcggttcggcgagctttctgccggcgtatgcgtggcgctttttgcgtttgcatcggttttggcgtggagctgctacggtatggacgcgctactgtatttattgccgaaaaaaggcgcggcggaaaagagaatatacatggcgtttacggcgctttcctgctttttggggtgcatgtcgccgttcctcggcgttttaaatgtatgtgatgcgtttaacggcctgatggcgcttttgaacgtcccggcgcttttggttttaacgccgcaggtttttgcaaaacaaattgcccaaaagccaaaaaaggtatagatttttcttcgacaagatgttaaaatacaaatagagagaaaagcgatgaatagaggggcttttaacggttcgtttagcctgtctttgctgatctccaaaaacaacgaatatgcgtttcaaaaaaacgcgataaggaggaaatattatgaaattgatccttgcgattgtcagcaacgatgacagcggtgcggtctcttccgcactgacaagaggcggcttctccgtcacaaagctcgctactaccggcggcttcctgatggccggcaacaccaccttcatctccggtgttgaagacgaaaaggtcgatgaagtcatcggtatcatcgcgaagcattcccgccgcagaacgcaggttgtgcccagtacctccaccatggatgtgggcatgtactcctctttcccggtggaagtcaccgtgggcggctctaccattttcgtgctgaacgtagaccgttttgagaaggtttaatgcagtttgaaggttttgcggggaatgcggctctgaaaacggcgctttcggcggcgttttcgcgccgcaggctgccgcatactcttcttttacagggtgaagcggggcttggcaaacgcacgttggcgcagattctggcccgcgcggcggtctgcacatgcgaaaaccgcgatttagcgccctgcggcgtatgcccggcgtgcattcgcgcaaaagcaggctcgcacccggatatccgcatcgttacgggcagcggcaaatcgaacacgatttcggtcgcatccgtcgatgaagtcatccgcgacgcatacaaaaagccggaggaagcggatatcaacgtctactgcatttttgcggaaaatcccatgccggagatcacccagaataaacttttgaaggtcattgaagagccgccgacaggcgcgcttttcatctttacggtgctttctgcggacgctttgctgccgacaatccgctcgcgtgcacaggttttcaccgtgcgcccgccggaggaaagcgaagcggcggtttacgtgcagaacaagaccggcatgcccatggtggaagctgaaaagcttgcatctctgcaccgcggcaacatcggcagaatgctttcggacggcgaaaacggccgcgccgcaaaagcggagcaaatggcggaagacattgcaaacgcactcgtttccggcacggagcatgaccttttggcggcgaccgcgccgctcatcaaggacaagcccttattcccggaaagcatggaacgcttgcagcttttgctgcgcgatgcgtgtctgctgaaaaacaatgtaaatgtgcaggtgcccgcgcgtgaggtttgcgacaaattaagacgcaagctgtctttaaaagcgctgatggcgctgtgcgaaatgacggcaaaatacacggaatactggcggcgaaacgcgaacatggcgctgcttgtaacggcgctgtgcgccgaaatgaaagaaactgcgggcaaataaagcctgttttgaaataaaaatcgtccgtgttgtcaaaataacaatacggattttcccggaaagaaaggaagccctttacgggctgtggatataaatatggcagaagtaatcggtgttcgttttaagaacatgggcaaggtgtattactttgacccgaacagcgagaagctctccgccgacgaccacgtcgttgtagaaacggcgcgcggcgtagagtgcggcgaagtggcgatggccaaccgcgatgttgcggatgattccattgtgcagccgctcaaaaaagtgattcgcaaggcgacaaaagacgacctgcgccgcgtggcggaaaatgaactgaaagcaaaaaatgcgttcacgcagtgcgaaaagaaaattgcggagcgcggactcgaaatgaagcttgtcgacgtggagtacacgtttgacaacagtaaaatcctcttttacttcacggcggacggccgtgtggacttccgcgagctggtaaaagaccttgcgggcatgttccgcacgcgcattgagctgcgtcagatcggcgtgcgcgacgaagcgaagatgatcggcggcctcggcatctgcggcagaccgttctgctgcggctcgttcctcggcggctttcagccggtctccatcaaaatggcgaaggagcaggggctttctctgaaccctgtgaaaatctccggcacgtgcggcagactgatgtgctgcctgaaatatgagcaggaggcataccttgacctgctgcgtaccacgccgaaggtgaacgctgtggtttccacgccggacggcaagggcgttgttatcgaccagaacctgcttaccggaaaactgaccgtgcggctcgataagagcccggacgccgcgccgagcgtctacaaagtgaaggacgtacgcgtgctgaaagacgggcagatcaagctgaataagaaggaaattgaggaatttaagaagctggagaactaaaagtacctgtattttggcgggcttttgttacgtatctgtaaaaaagcaattttcgcttgcattttcatggatttgtgttagaatgtaggtatcaaatacatggaggtgtcctaaaatggcatataaaattacagacgcttgcatcgcttgcggcgcttgcgcagacgcatgtcctgtttccgcaatctccgagggtgacggcaagtacgagatcgacgctgatacctgcatcgagtgcggcgcttgcgctgacacttgcccggtttccgctccggagcaggcataatcgctgacattgcgtaaaagagagggctgcccaagcggcagtcctttttcttttgctgttaaaagtctttagtcaagttttcttcgagaaaacttgcggatattaaagggcggcggtgccgccctttgggagaccccctaattgggtctcccacgaggaaacagtccaccggactgtttcctctcccgtcctgattcttggcaggcaaaaagatttcgtcgtctgcggacgacgatttggggcgctgccccaagaccccgcgacctttttgaaaaaaggtcgatcaaaaacttttgaccatgtttatcggaagctaaattcaaccaaaaggagaaaacctgtggaaaatctgcactgggagccgcttgcgcctgcctgccgtgtactcgtcagccgcgagcacacgtttaatacggacaccattttgctggcgcattttgccgcgccgaaacacaaagagcgctgcattgacctcggcacgggctgcggcaccatttcgcttctgtggaaggcaaattacgccccgcggcacatcacggcggtggaactcggcgagcaggcgttttcgcaggccttgcgctccgtttcggaaaacgggtatgaagaaaatatcgaggtcattcggggggatatacgggagatcaaaaaaatcattccgcacccaacgttagatcttgcggcgtgtaacccgccgtataaggccgtgggcgcggggctgcgcaacccggacgaacgcatggaaaacgcgcggcacgagtgcacctgcacgcttgaagatgtcgcgaaagcgggcagagacgtgctgcgcttcggcggccggttttgcctatgtcagcgcccggagcgccttgcggacgcaatgcatgtttttagaagctacggcttagagccgaaaaggctgcggctcgtacagcaaaggataaacaccgcgccgtctctgtttttactggaagtgcggcgcggcggcaaaccggggctttccgtactgccgacacttattatagaagacgaaaacggcgggttttccgccgaaatgctggaaatttacgggaattacaaattcggtcacgagggaggacgcgcagatggaagaaaataaactgcttcgcggtgcattgtatgtggtgggcacgcccatcggaaatttgtcggatttttcgccccgcgcggcggagaccttggcggcggtggatttcatcgcagcggaggacacgcgcgtcacgatgaagcttttaaaccacttcggcattaaaaagccgcttgtaagctattatgagcacaacaaggccgaaaagggcgggcgcattgtagaccgcattttggcgggcgaaacgtgcgccatcgtctccgacgccggcatgccggccatctccgacccgggcgaagatcttgtggcgctatgcgccgagcacgacgtgccggtgcttgttgtgccgggcccgagcgccgtcatttccgcgctggcggtatcgggactgccgacgggcagatttacgtttgagggctttttgagcgtcaataaaaagagtcgtaaggaccacttggagtccgtcaaaaacgaagtgcgcaccatggtgttctacgaagcgccgcataagctgccgtatacgttaagagatatggcggaggtattcggcgacagacgcatcgcgcttgtaagggaaattacgaaaatccacgaggagtgcgtgcgcacgacattatataaagctgccgaatactacgagcagaacgccccaaagggcgaatttgtgctcgtcattgagggtgcgaaggcggaagaacagaaagaaatgacgttagaggacgccgtagaagccgcaaaaaaagcgatggaaaacggcagctccgccagcgacgccgctaaggaggccgcaaagctctccggatttaagaaaggcgaaatctataaagcgctgatgaactgacgggcccgcggcaacggcggtttaaagtctttagtcaagttttcttcagaaaacttgcgggtgcgtagggcagagccctacgtcgctttccgcagaaagcgaaatctttttgcctaacaaaaaactaggaaagtaggattgaatgtccgggggacgttcaatccgtaggaaacccagttgcatgggtttcctaaaaggcggtcacaaaccgcctttcaaaaaccgaacaagccaaaagaaaagcacgcagactcgaaagttctgcgtgcttgagttttttatataaagggaacgatcaggatttagaagcgggtgcgggatcggcatctgcggctttcggcgtgtcgtctcccttgtgcctccagttcagccatgcacagaacgtgtagagaacggggagaacaaggtcgagaacataggtgcagatttccggtatattcggcgcatcgccggtgaaaatctcgtacaaaacattgaaaagaatgatgacgccggtagcaaggcccagaaaaaagcacggcttcatgctgttcgggcggtctgcacgggcgtggcccatcagccccgcaatgagcagcaaaacgggcacaagcatcgcgcccgcaacggacagcaccggcatagaggaattaaagtaagcggaaaggtcgtattcctccacgtattttcggtcgatgaggcacagcagaagcgccacaagcgacgctgcaccgtacaaaacgaacagcacgctgcaaattttaagcggaagtttcccttttatctttatggccatgcggcacgcatccttttttgattcgagtttctcggaaaaaattttatagtttgattttacctgcaacgcgtgaaaattgcaaccgtttttcatgaactttccgtatcaaaataaaagttttccgaaaacagttgcattctccggttgaatgtgctataaaagatgtacgaacaacttgaagttcatgatggaggtttacaaagatgaaaagcgaacgtatccccgtaaaatccttttccgccgataacggtttcatcggcaaaatgcagaagctcgtgcgcgaggaggtgctgccgtatcagtataatatcctgaacgacgccatcccgggtatcgaaaagagccacgccattgaaaatatccgccttgcagccgaaaagctgaggggcaaggacgtaaagccggacgaattctacggtatggtgttccaagacagcgatgtcgcaaagtggatcgaagcggcagcctatgcgcttgcagcgggcgaagacccggagcttgaaaaggccgtggacgagaccattcagctctacggcgcttcccagcacgaagatggctatgtcgattcctatttcaccgtgaagtgtcccgacaaaatgtggacgaacatctgcgatgcacatgagctttactgtgcaggccacatgatggaggctgccgtggcgtattatgaggtcaccggcaagcgcgagctgctcgacatcatgtcgaagagtgcagactgcatttacgagcaattcatgaagaaaaacacgcgtgcctacccgggccacccggaggtggagctcgcactgatgcgtctgtggcgcgccacgggcaacgaaaagtataaggagcttgcaaagcactttgtagacgtgcgcggtcaggccccgaattatttcgtggaagaaaaaaagaaccgcggctggaacgtttgggacggcgcggaggagctgaataccgactacacccagagcaccctgcccgtgcgtgagcagaaggacgccgtgggccacgccgtgcgtgccgtgtacctttacaccggcatggcggacgtcgcaaaggaaacacaggacgagacactgcttgctgcctgccgtaatttgtgggagagcatcacaaagcgccgcatgtacattacgggcggcatcggctccacgtttatgggtgaagcctttacggtcgattatgacctgccgaacgacaccgtgtacgccgagacctgcgcctccatcggcctgatgttcttcgcgaagaagatgcttgaaaacgagcaccgcggcgaatatgccgatgtgatggagcgcgcgttctacaacaccgtgctcgccggcatgcagcttgacggcaagcgtttcttctatgtgaacccgcttgaggtcgtaccgggcatttctggcaaggccgtcacgcaccgcgcagtgctgcccacccgcccgcagtggtatgcctgcgcatgctgcccgccgaatgtggcgcgcatggtgtcttccttcggctcctatgcgtacagcgaaaatgaagacacgttcttcattgacctctatgcaggcggcacggtgaagaccgaaaagggcatcacgctcacctgcgagaccgatttcccgcacggcggcacggcaaagtatacgattaagggcgaagcggaaacgacggtcgctatccgcattccggcatggagcgaaaagagcttgctgaccgtaaacggcgaagcggttgaccttaacaccgtgacaaaggacggttacgcttacatcacccgcgcatggaaagacggcgatacgcttgcgctcaccatggatatgaccccgcacgttgtgtacgcctccgcaaagattgcggcggacagcggcaaggtgtgtgtacagcgcggcgcgctcgtctactgcgcagaggaagtcgataacggcaaggtgctgccgctgtatgttaaagccggtgcagagccgaagacgctcgatttcgagcccgaaacgctcggcggcattgtgcccgtagagatcgcaggctgcgcacagcaggacatcgacacgctgtattccacaaaggctccgaaatttgtggaaaagacaatccgccttatcccgtattacacatgggcaaaccgcggcgaaaaccagatgcgtgtctggctgccggtcaaataagaaacgcgcttatatcgtcataacagaacagagaaaacccggtgcagtctggattcggctgcatcgggttttgctgttttggaattttagtcaatggtataaaatcaagctcagtcaacaaacttcatgccgtgaccatccgtatagattgtgccctgcaaaaggcgcacgccttctatgatgccccaaatttcggagacgatggcaagcgtgccgcagctgcaaacggtgatggcaagctgtgcaatgccaaggctcgttttgccgatgtagaagttgtgcacgccgaacacaccgaataaaatggcgagcacaccggctgcaatgcggcttttggtgccctgcggcgggtcatacggctgtgcgtagttctgcccatactgcggctggccgttcggggcgtagtaggtttgctgcgggttgttataatttgcactattggcgttcgcctggtactgctccgtgtagcgcggggggcggtagtcgaccgcgccctcctgcggggtgggctgctgcggctgtgcggtgtaggccgcataggtgtactgcggcggctgatactgcggcggcgttggcacttccgttttcggtgcttccggggcagcttcttcggctttcggcatatcgcagcacggttcgtcttttgcggcggcttctgcctgctccgcaaggcgctcggcttcggcaaagctctgctctacgggattcgtcaaggtcggctccggctttgcagtctccggggtggtgtttttttcgtctgtcataaagagctcctttctcagtccttcagcttgatgacgtttgcatccattttgatcttgccttctaagatctgcacgccctcaacaaggctccagacccacacggcaactgtggaaagaccgcaggtgagaggcgcgccgagcgtagcgaccaaaatctggatcagtccgcgctgtgtattgccaaggtaaaaattgtgcacgccgaatgtgcccatcagcatgccgaacagtccggctgcgatacggcttttttgcggataaccggcgggcggatctatgccggaaagcggtgcgccggtgtagggattgtaattttgaccttgcatatacggtctcctctcatctttgttttgtgattttattgtagcgaaaaatttctttagatgcaagcgtttttgcgcaatgtaagaatgtcttaaaatttatgaaagagacggaaaaatcatgccggaaacggtgcgaaatcttgaaaaaaagcgcgggctgttgtatactgaaacaacataaacaccgtaaaacgaatcgaaagcggagaggagaattctgcaatgaggattaaaatttcggcggacagcacatgcgatctgtcgccggagcttatcgaaacgtataatatcggcattacgccgctgtacattgaaaagggcgggcagaattgtcgcgacggcatggacatcacgccgcaggagattttcgactacgtgcgctccggcaagggcgtgtgccgcactgctgccgtgaacgtgggcgattacacggcatttttcaaaaaatgcagggaaaattacgacgcggtgatccattttaatatcagcagtgatttttccagctgctaccagaacgcctgcaccgctgcggcggagtttgaaaacgtgtatgtggtcgattcccgcaatctttccacgggcatcgcgctgctcgttttggatgccgcagagcgtgcggaaaagggagaggaccccaaagagattgccgcgctcatgcgcgaaacggcggaaaaagtagaggcgagcttcgtcatcgatacgcttttttatctgcaaaagggcggcagatgctctaccttggcggcgctcggcgcgaatttattgaagctaaagccgtgcattgaagtgaaggacggcaaaatgggcgtgggcaaaaagtaccgcggcaagatcgacaattgcattgcacagtatgtgcgcgagcgtttgcagggcagagacgatttgagacgaaatcgcattttcatcacgcactcgggctgtgcgccggaaattgtggagaatgtgaaagcgatcatcaaggaatgcggcggcttcgacgaggtgttggagacctatgccggctgcacggtctcgagtcactgcggcccgaacacgctgggcgttttgtttgtgagaaaataaattttgtgagaaagtaaattctgaaaggcttcgcctttttgggagaccccctaattgggtctcccacggacggaacgtccactggaagttccgtccttccgtcctgatttttagtaggcaaaaggatttcgagctctgcggagctcgaccaaaggtttcacctttggaatctacaaccgaacgagaagttcggtttcaacttctttgaaaaaagttgattaaaaactttatttgtcaataaagacatgaactgagtgaggaaagaacaatggagaacaaagagaaaattcgctcgcttgcggaaaacgtgtgggcgtacattgcggcgtttttgcggtggggcgttttaggcttgcttgtcggcgggcttggcggcttcgtcggcgcgctgtttgcaaaatccgttgcgtgggcaacggccatgcgcggcgctaacccatggcttttatatttgctgcccgtcggcggtttggccattgtgggcgtttataaactttgccgcgtttccggcgtaggcacgaacgaggtgttcgagggtgtacgcagcaataaaggtgtttccattttgcttgcgccggccattttcctcggcacaacgattacacacctgctcggcggctccgcgggccgcgagggcgcggcgctccaaatcggcggaagcgtggcgacgttcttcggcaagctgttccgtttaaatgaggaagaccgccacattctcaccatgtgcggtatgagcggcgtgttcgcggcggtattcggcacgccgatggcggcatgtgtcttcgcgatagaggtcgtcagcgtcggccgcttctgcacctcggcgctgttcccgtgcatcgtgtcctctgcgtctgcctatgcactggcgctggttatgggcgttgccccggagcattttctcgtcgaaaatgtcccggcatttgacatttccacaatgtggcgtgtactcgtcattgccattttgtgtgcgattgccagtatgctgttctgctgggcgatgcacagcggcgcaaagctcttcaaaaagctttttaaaaacgaatttctccgcgcggcggtcggcggcattgtggtgattttgctcacattgcttgtcggtacgcgtgcgtataacggcggcggtatggacgtcatcgagcgcatttttgaagagggcgtcgtgcgtcccgaggcattcctgctcaagatgatctttacctccatcacgatcggcgcaggctttaaaggcggcgagatcgtgcccacgctgttcatcggtgccacgctcggcggtacgctggcgctgcttgtcggtctgagtcccgcgttcggcgcggccatcggcatagcggcgctgttctgcggtgtgacgaactgccccattgcgacaattctgctcagcgtagagctcttcggcggcgaaagcgcactgttctgcatgatcgcggcgcttgtaagcttcctgttttcgggctatttcagcctttattccggacagcagcttatttattcgaaattgagcgagaaagagatcaatgtgcacggacactaagccgagaacacaggcaaaatcttgacaaaacgcacttggcgtggtagagtaaatacgcggaaaacgcaaaaaatagtaaacggggtgctcgtatacgggctgagaggagggtgtgaccctcgacccgaataacctgatttggataatgccaacgtagggaacggaaatatccgggtatgtgtcattatcacatgcccttttcttttgttccgaaacacgcattaggaaaggaacagaaaatggaatacacaacgcagatggatgccgcccgcaagggcatttttacgccggaaatggcgaaagttgccgaaaaagagcacttggagccgaaaaaactcatggcgctcatggcggagggcaaggtcatcatcccgtgcaataaggtgcatacgtgcatagagccgaacggtctcggctccatgctgaagacgaagatcaacgtcaatctcggcacgtcccgcgacctcaccgaccttaacatggagcttgaaaaagtgaatcatgcggtcgaaatgggcgcggaggccattatggacctcagctctttcggcgatacgcagaagttccgccgcaagctgacgcacgagtgtccggcgatgatcggcaccgtgccgatctatgacgcggtcgtttactaccacaaggcgctcggcaaaatcactgcgcgcgagtggattgacattgtgcgcatgcatgcggaggacggcgtagacttcatgaccatccactgcggcatcaataaagagacggcgaggaagtttaaacgcaaccgccgtttgatgaacatcgtttcccgcggcggctccatcatttttgcatggatggaaatgaccggcgaggagaacccgttcttccagtattttgacgaaattctcgacatttgccgtgaatatgacgtgacgctcagcctcggcgatgcatgccgccccggctgcctgcaggacgcgaccgacgcttcgcagattgaagaactcatcacgctcggcgagctgaccaagcgcgcgtgggaaaaagacgtgcagatcatgatcgagggtcccggccatatgccgctcaatcagatcgcggcgaacatggagattcagaaaacgctgtgccacggcgcaccgttctatgtgctcggcccgatcgtcacggacatcgccccgggctatgaccatatcacctccgccatcggcggcacggtggcagccatgaacggcgcatcgttcctgtgttacgtcacgcccgcagagcacctgcgcctgccggatgtggacgatgtgaaggagggcatcatcgcggcacgcattgcagcgcacgcggctgacatcgcaaagggcgttccgcacgcgatggattgggacaacgaaatggcagttgccagaaagaagcttgactggaacgcgatgtttgacctcgcaatcgaccccgaaaaggcgcgccgctaccgcgaatcctcccgcccggagaaggaagacacgtgcagcatgtgcggcaacttctgcgcggtgaagaacatgaaccgcatcttagacggcgagatcgtctccatcttcgatgaataatttgagatcataagactcctatgtgatttgaatagagaacggcacagccttgggcttcctcccgggctgtgccgttctcgtttatatgggaatagccaccccggttttgccggggtggctatcaggctttacggattcgtcaaaatctgtgccaagtccgaatccttgcctaagataatggtcttctcgtcgccgtttaaggtgctctttaaggcttcaagcgcctgcgtgaatttgtagaactcctgcttatcctcggtattgtacgctttgccgagcagtcgcatgtattcggcttcgccctcggcctgcaattttgcggcttcggcctccgcgttcgagacaatgatgttcacctgcttatcgacatcattgcggatgagcgatgcttcgtagttgccgtctgcggtgtatttttccgcaatctgctggcgttcggagatcatgcgggcataaacggcgctttcgtttgcctccggcaggtcaaagcgcttgattttcacgtcttcgaccttgatgccgtagtttgcggcaagcgtatcgacgcttgtggtaatgccctcgtaaatgtcgtttcgcgctgcgccgtcgtccatattgatgatgtttgactgcgaaagcgtgcccattacggttttgagggcgttgtaggtcagcgcgtttaagcgttcctcagcaacgctcgtgttgccgagcgattggtaaaatttcagcgggtcggagacgctccacagcacgtagcagtccacggtcatgttctgcttgtcggcggtcagcacttcgctcggcggaatatcatacagcatggtggctttcgggaaggacttcacgctgtccaaaaacggcactttaaagtgcaggcccggctcatcggtcgtcgagatgattttagagagtcgcacggtgcagccgtattcgttttcctccacggtgtacacggaattaaagaggcacacagccgccagtataagcacggccaagaggatcacggttttctttttcatcggttattcttctcctttttcgggggcggtcgtattcgtttcgctctgtgtgaagctttcaagcggcagcaccttctgcacgccgttttcgccggaggtatcgatatacaccttcacgtccggcagagcttcggaaatggcttcatagtacattctggagcgcgtgatacccgggttctggctgtactccttgtacatggcctcgaacatcgcgacctgctccgtcgcttcgttgatgcgcttctgcttcaaatattcggcgttacgcagcagctcgtcggctttggcttccgcctgcgggagctgtgcgttctggtaggcgcgcgcctcattgcgcacggtctctgcctgctgctttgcggtctccacggccttaaacgcttccgtaacctcatcggtcggtgggtcggagtcctgaatttttacgtctacaagcgtcaaaccgatgtcgtattcctgcaaaatttcggatacaagctctttgacacgcatctggatggattccttgccggtcgtcaaaacggcgtccacggcttcggatccgaccacattgcgcacctgactttgcagcaggttgcgcagaatcgtttccgggtcatacgagccgtagaggtacttttcagggtcgctgaccttgtactccacgaagaactccacgtcgacgatgttgtagtcgccggtgatcattttcgtttcgctttcgatgatgtcaaagttatcggcggaaccgacgctgcggtagccgagctcgagcttctggtagacatttacgttgaccttttccactttctgaatgccgaacggcagcttaaagtggaagccggcatccgtaatgtccgtcaccttgccgaatgtggtcacaacggcctgctccttgtcgttcacggtgtaccaagagcttgccacaacggcgagcagtacgagggcgatcacggcgatgagcacgattttcggcagcttctttaaaaagtctccgctcggcttttttggcgttgggatgggaatcccggtgcccttgaattcctcaaacataaatttctcctttttcaaaatctacacgctcacttagagcgcgttcatcatgctctgcgctttggtttgcagctgcgcggcgcgccacgcggtgatcataatgcgcaaagcctgttcaatccgttccttcgcgccggggatcgactctttgtagtccttaaggccgtccgcaatcaaacggttcatttcgctttccgaggttaagccgtgcttctgcacgctgcccgccaccagcacgaatgcgccgtacagctccgtatcgtcgatggtgtcgtcgccctcatcgtccagcgcaccgttgatgtagcttaaaagcttgcagatctgctcgatggaaagcgtgcttttcaacgcgttgatcatcaagatgcggctcaactggcggcgcgtgtacttgcgctgcttcggcggtgccaaaaagccgcgctgcacccagttttgaatgatgtacggctccagccccgtgacctgcgtcacctgcgaaagcaccagcccgccggctaaaaacagggaagaaaaaacttcctccgccgcctgcggccggtctgcgtcaacggagagcaccgttccgggaagtgtccactccactttgttcatctccttctatgtgatgatgagagtatacagcataatcacatgattgtcaatagaagtttaaagattttttcatgaaatcgtaaaatcctttgcacatgggcaaatttgtcatttttgcccgtctgccgcggacagaaacgggcattgacaaggctactaaaacccgatatactgggaaaaagagcaaaaatgaggtggagaaatggtacaatgctatgaatgcggcactgtgtacccggaaacaatgcgctgctgcccaaactgcggcagtgaagcgaaaatacagcttgcgccgaactcggagtttgaagaaccgaaaaatccgtatgtgcagctctaccggccgtatgggatgccgatgaataaccgcatgaacggctacgcggtcgcgggctttgtgctttcgtgtgtcgcgcttgtgctgatgtgtgtattcccgccgctgtcaatcctcggcatcgtgttctctgcattggggctttcacagattaagaagagctttcagcggggcaaaggcctcgccgtcgccggacttaccatcggcatgataacgaccgcgttcagcatctttttgtacgccatggtatttattgagtcgttgtggtaagaaaaatccgcaaaacaaaaaggcggaagcaggccgaaaagcctgcttccgccttacttattccctttaaaaagtgccgtaaaatgcaaaacgactgcccgaaagcagtcgtctaatgcattgcgatgttgggaaaattacgcgccagcgttcagcttcttatcgagagcggacttctttctggcagccgtattcttgtgcagaataccctttgcagcagcctggtcgattctcttgacagcgaccttgacagcctcagccttgtcagcagcattggactcgatagcaacgttagccttcttgatctctgtcttgagctgagagttgatcatcttgttctgcagggtctttgcggcagcgaccttaacgcgcttcttagcggatttgatgttgggcacagtagacacctcctcgatcgtaggattatagtacggcgaaaccgcctgaaccgtattggtgggcatagattcgccttgaactccaataacgcagacataatcataccacatagcccccgaaaatgcaagagcttttttgccttttttcgtaaaacggcagataaaaagcgcggtttaccgttagaagggctgtaaagtacttccgtatgataaaaatctgttttaaatgcaatgtaaaaagtcccgtaagccgagattttcttatagacatttttttaacgatatcgtataataaaagcgaaaaacgcaggaaagcggcgcagacggcagccgctttataaaaaggcggcaaagccgcaaatttacggaggaggcgcttattttgtccaagttttttacaagccgaaagatttttgacaatgttacgcagatcggcggtctgggcggagagctttgctatttgatcgaaggcagtgaaaaagcgctgcttatcgatggtcttacaggcgtaggcagtttgaaagcgtttgtacgcgaatgtaccgatttgcccgttacgcttgtgctgacgcacggacatgtggatcacgccggcgcatcgtttgagtacggggaatgctatgtgaacccggcggacgttgcgcttttgtacgagcacggcgacatcgacaagcgctacggatttgtgatgggcggcggcaagccggagggggcgtttttgcccaaaaaggaagacgttgtgccgccgtgcgcagtgaagacgctgcctgttcaggacggcgacgtgttcgatctcggcggcgtgcagattgaggccattgccgtgccgggtcataccgtgggaaccatggtctatctggaccgtgcccgccgcgttctgtattccggcgacgcctgcaatgcgaacacactgctcggtttgccgtgctccacaacagtcgagacgtatgcgaaaagcctcgaccaccttgcgacatatcttaaggacatcgacaagttttacggcggtcacggtctgcaggctgttccggcgtacatcgtagacgaagcgatgatactgtgcgaggagattttaagcgatgacgacgaccggttcgaaacggagttcctcgggcgcaaatttctctatgcccgcaagtttgacggcatgttccaccgcgaggacggcggcatcgcgaacattgcctacgtcatggaaaaggtctacaataaataaaaagcgccacaaagacatgcgcgttttgccatacgactgcggtgtccgtgcatgttgttcactttttcgcacgggcttgacacagctttgacaaaatccccaaaagcccgcagaatgcgcccaaaacgccgaaaattacttgatttattcccctgaatatactataatcaaagcgataatccaaaattctgcaactatactgaaaaaaggatggtttgaactatgaataaaattaccattatcggcagcggcagcgtcggctccacgatcgcttacaccctcaccgtgcagggcattgcttccgagattgtcatgatcgatatcaacgaggaaaaggcaaagggcgaggccctggacatccgtcagggcgttccgttctgcacgccatgttccgtttacgcgggcagctatgaagacgcaaaggattccgacatcgtcatcatcacgtccggcattgcccgtaagcccggccagaccagactggaccttgcacagacgaacgtcaacatcatcaagagcatcacgccgaacatcacgaagtacgcaccggatgcaatctatctgttcgtcagcaacccggttgatatcctcacctacacgttctgcaagtgctccggcattccggagtcccgcatcctcggttccggtaccatcctcgataccgcccgtctgcgtgcacgtctctccgagtactaccagattaaccagcagaacgtacacgcttacgttctgggcgagcacggcgacagctccttcgtgccgtggtccgttgcgaacatctccaacatcccggcaaacgcataccagaaggctatggaaaacaccgacggcatgttgattccgccgctcaactatgcggacgttgaggattacatgcgcaaatccggcggcaacgttatcaggcgcaagggcgcaacgttctatgcggtttccatttccgtctgtcatatcgtaaagtgcatcctctccggcatcgataccaacatgacggtttctaccatgctgaacggcgaatacggcatcagcgatgtctgcctgagcctgctcaccaccgtcggccacaagggtgttgtgaataagctcaacctgccgctgaccgagagcgagcatgccgcgcttgtacatagctctgagtgcctcaaggagatcatcaagaaggttcagatctaagttaagtttatccgtaacaaagccccggagcacctgccccggggcttttcagtgaagacgagaggaatgccatggaagaatcatataaaaaggtttcgtttcaggaagcaaagcatatcatcgataccgagccgaactgcgtgatcttggacgtgcgcgacgaagacgaatacatcacgggccacgccgaaaacgccgtgcttttcccggtggataccattgacgaagacaccgcggaggaaaagatccccacgcccgatacgccgattcttgtttactgcaagagcggccgccgcagctttatggcggcgatgaagctcgaatcctacggctatacgcatatttacgacatcggcagcttggtcgattggccgtatggcttggaatattaagctctgatttctacagaaaagtaaaaaacggttgaaaagtgtgcgttcgcggcaggtcaatttcctgcacagcggatacacacttcgtttttaagcggctttccggcaaagaaatcatcgaggttctgcaccgtcacttccgcaatattatacaatgcctcttcggtcaaaaacgcctggtgcgccgttaagatgacgttcgggcgggagatgagcaatgccaaagtgtcgtcctgtacggcggtgtcggaatggtcttcaaagaaaaacttcgcctcctcctcgtaaacgtccagtcccgcgccgcgcaaggtgccgttattcaatgcgtccaaaagcgcttcgctgtcaataagcgcgccgcgcgaggtgtttaataaaaacacaccttttttcattttgtcaaacgctttgcggtcgagcatgtggtaggattcttcactgagcgggcagtgcagggagatgacgtcgctttcgcgcaggagtgtatcgagcgaaacgtactcaaagtccggcgcaggatacttgtcatacgccaaaacgcgcatgccaaagccgcggcagatttccgcaaatgcgcggccgatgcgccccgtgccgatgataccgacggtctttttgtagaggtctatgcccgtcagacccacaatactgaagttgaaatcgcgcgtgcggatgtaggcgcggtgcaaacggcgatttaacgtcaataaaagccccatggtgtgctccgcaacggcgtgtggggaataggcgggcacgcgtaccacgcgcagcttgcccgctgctgcctgcatatccacattgctgaagcccgcgcagcgcagtgccaaaagctgcacgccgcagcggtgcatgcggtcaatggcggccgcgtccacacggtcgttcacaaaggcgcacacggcgtcaaagccgtccgtcagcgtcgccgtgtggcggttcagcttttcttcaaagtacgcgatttcatagtgctttgccagaatgtcgaaccacgtgcggtcatatggttttgtatcaaaaaatgcgatttttttcatgctgcactctccttttgttttaacgttgcacagttattctgcgcgtcataatttgggttattccgcacagaataagccaaagaaaacgtataaaacgaaaggcgtggattttcacatggaatatgtaagggcgtttgcggtcggcggggcaatctgtgtggtcggtcaacttttgatcgatctgacaaagctcaccccggccagaatcatggtggcctacgtcacgggcggtgtgatcttaggtgcgctcgggtggtatgcaccgctcgtgaatttcgcgggctgcggcgccaccgtgccgctgagcggcttcgggtatctgttaagcgagggcgtaaaagccgccgtaaaagaaaagggcattctcggcgtgttcacgggcggaatcaccgccggtgccgccggcattgccgcagccgtcttcttcagctgcctgatggccgccatcgcaaagccgaaagaaaaatcgtaaaaaacaagcgccgcagagaacggaaactctgcggcgcttgctcatggttcgaaaaaggaattttgtctgacagcacgcatccctttttcatccttttcgtccactcggcttctttgaagccgacgaggacaaacttatcttttgtgctcctgatccgttttactttgccttaaacacacggtttaagaggtaaatgctcaaaatgattgcggcaatgacaaggaaaacgccggtcatgccttttgccatatactgtaagctgtctaaaaatgcgggaacattgaacatacgttatcctcctcaatggatcatgtttaagatgatgccgcctgcgatgacagacgcgatctgaccggagacattggcgcctacggcgtgcatcaaaaggaagttctgcgggtcttcctgctgtcccattttctggataatgcgtgcggacatcggaaacgccgaaatgcccgccgcgccgatcatggggttgactttattcttgacaaacaggttcatgattttcgcaaacagtacaccgcctacggtgtcaaacacgaatgcaatgagacccagtcctaaaataagcagcgtgtccacgcgcaaaaattccgccgctgtcatatgtgcggtgatcgtgatgccgagaatcagggtgatcaagttggacagcacgttctgcgcggcatccgaaaggctgtttaacacgccgcactcgcgcagcagattgccgaacatcaaaaagccgataagcgccgccgagcgattggacacaatgccgacgactgccgtgatgaggacaggaaacagaattttggtcgtttttgagacagaaccgggcgtgtacgccatgcggatgcgccgctcggttttggtcgtcagcaagcggatgaccggcggctgcacaatgggcacaagcgccatatacgagtatgccgccacggtgatggcgccgatatactgcgaatttaagacgttcgcgacaaaaatggaggtcgggccgtccgccgcgccgatgatcgcgatggaggcggcgtcgtgcaggtcaaagttaaacagccgcgccatgctcagcgtgaagaaaatgccgaactgcgccgccgcgccgaataaaaacagcttcgggtttgagagcagaggctcaaagtcaatcatcgcgccgatgccgatgaagaggagcagcgggaaaagctcatttgcaatgccgctgtcaaataataacgtcagtacgcccacttcttcgccctgcgtcaccgcgccggaaagcggcagattgacaaggattgtaccgaagccgatgggcaaaagcagcgcaggttccatttttttcgcgatggcaaggtagatgagcacgccgcctatgcaccacattaccgcgtgctgccacgtcacattgcccacgtttgcgaaaagctcgcttaaaaagttcattttcataccttcctctcggatgattttgccgcctttgcaaaatccttgtctccgaaagaaaataaaaaagagacttctatcctgccgcggcatgataaaagtctcgcagattacaacgtatacggacggggaaaccgtcgtgctgacgcatacattacagatatttcctgtttgctactcccttttatatccatattttacgggagcgcggcgcatttgtcaagcgaaagtttacggcagacggtagcccgctgcaaggtacagtgcgtaccagtcttcgcgcgcaagcgtaatgtcaagcgcggcggcgcagtcgcacaggcgctttggattgatggtgcccgtaacagcctgcatttttgcagggtgacgcagaatccacgcaagcgctatggcggtgtttgtcacattgtatttttccgccagctcgtcgagctttgcgtttagcttcgggtatttttcgctgccgatgaaaacaccctcgaagaagccgtactggaacggcgaccacgtctgaatggtgatgttgtgcaggcggcagtagttcaacacgccgttatcgagcaccgggtttaagccgtcgcagatgtttgtgttcatcggctgcgcgatcatcgtggcatttgtcaggctcatttgcaactggtttgcgcagatcggttgatgcaaagcgctctgcaaaagctccatcgtgtacgggtcttcgttggagacgccgaaatggcgcaccttgccgctcttttcgagttcgtcaaaggcttccgctacttcttccggctccattaaagcgtccggacggtgcagaagcaaaacgtcaagataatccgtgccaaggcgctttaagctgccgtctacggcagacaaaatgtgttcctttgaaaaatcgtacattttgccgggcacaatggcgcatttcgactgaatgataagatcttcgcggcgaacgcccgcgtcctttatcatctcgccgaacacacgctcgcatgcaccgccgccgtaaatatcggcgtggtcgaaaaagttgagtccaagctccaacgcggtgtgcagaaatgcatctgcctgtttgcgctctgcgtccgcaagacgcatgcagccgagggctatgggcggcaccaaaagcccacttttgccaagtttgattttttccatacagcaagcctcccaaatgaagtctatttgccttcattatagaaaaacttatgcgcgtttgcaagagttttccttgctttttccgcgtacgcgggctacaatgagaaaaagactttggaggggttgccatgcggtttggtgtgtgtatgccgatcgagcaggcggaatttatcgcaaagctcgggtttgattatcttgaggtcagcgctgcgggacttgcagagatgacagaggcgcagttcgcggattttctgcaaaaaaatgaagccgcacccattcacgcggaggcggcaaactgtatgtttccgggtagtattaagctgacgggtgacaatgtcgattttgaagcgatccaaacatacgtcaatcacgccatagggcgattggcgcaggcgggcataaaaatcggggtattcggcagcggcggcagccgccgtgtaccggaaaatttcccgcgcgaaaaagcgtgggagcaattaaaaactgtcgcaaaaatcttaggtgacgccggtgaaaagtacggtgtcaccatcgcgctggagccgctgcggcacgaggaaacaaatattttcacaatgcagccggaagctttgaagtttgtcaaagaggtcaaccacccgcactttaagctgctgtgcgactactatcacctcataagcgaaaacggcacgccggaaatggtagagcagtgcggcgatatccttgcgcacacgcatatcgcaaaccccgtcggccgcgtacccatgacgccgcaggataccgcggattacaaagcctttttccgcgcgctgcactttatcggctacaacgcccgcatgagcctcgagtgccccgtaaagaaccccgaaacccagcttcccgttgtgcttgaggttttgcataggtgtgacaatgaataatgattcgtttttgaatgtgagtgcgtaaaaaacaagcgccgcggagaaatgaaactccgcggcgcttatttttacatcagtttggtcgttactggatggaaccttcaagatacgcttccagctcggcattttctttcttttccttgaaatagttcagcacggcaaaagcggcggtaacaacggcaacggcagcggtgatgcagccgataatggtgagcaccttgttcaaacacttcatgataaaccatcctttccggttcgccaacattctgaaagagaccgtacactgtctcactttgggcgattatgattacctttatcatacccaagtttcggcgaaaagtcaaacgtttttgtgccctgtcatacaaagtttacacatggcgtgagctgccgtgcgaaatcctatgaaaaattcttctttttgcaaacattttgcccatatgcaagcggtttctgcgccggatttgttgacaatccgtttaaaaaaacttacaatattattttagagtatttcagcaggaaacacccaaaatgcggcacggaggccgcataccttacctgtatcatttttcgaaggggagaacgcacggcactgccgtgcaaagaagttatggaagaaaagaatatgaaaaaggccaccatacgggacgtggcaaaggctgccggagtttcgcagtccacggtgtcccgtgtgctcaacaacaatggctacgtgggcgaagacgcccgccgccgcgtggaagaagccatggaagcgctgcattattcgcccagcgctattgcagtgtgtctttccaaaagccgttctcgcatgatcggcgtgatcgtgccgcagatctttgcaccgtttttcagccagatgtattacattgcagaccgcattatggagcggtacggttaccgccttctgctgtgtaattccgacgaaagcttaaagcgtgaaaaagagctcattgacgatctgctttcgtataagatcgccgcgctgctcatcgtgcccgtggatggcgacgagggcagcaacaaggagtatctcgactacatccgcagctcaggcacgcccgttgtgtgcgtagaccgtgagattgaaggaatccactgcgacggcgtgtatatcgataactataccgcttgttatgaggttacaaaagacgtgctcacgcgcggctaccgcaacattgcgtatatggcagacccgcccatatacagaccgggttgcgaccgtctgcgcggcttccgtgacgcctgcaaggaattcggcgttacggtgccgcaggagaatattttccttgcgccgattgaagatacgaaaccgttgaatgcgtttttgcatgacgttgcccgtcgggatgtcccgccgaaggcgatcatcaactttgtgcgcggctgggattataccatgctgcaagcgctgcattctgcaggactgcgcgtgccggaggacgtgtacctgaccggccttgacgatgacaacacgctgccgaacttcgactactccatgcagtatttaccgtctatgatcgatttttccgaggcagctgctaagctcttgattgagcgcgtggaaacggggaatgcgctgccggaaccggagcgccgcatcttcaccacgcacatgaagcctatatttgaaagaaaagtcacgctgccaaagcccgatgcagcgccggctgaaaccgatgggaaagagaagtaaagtacataaaagcaaaatgaaatttatcaaaccgaatttttacgacgcgtttcactgcacggccgccgcatgttccgatacctgctgcgccggctgggaaatcgacgttgatcccgataccgttgaatattacgaaaatttagaaggagagctcggcgaccgcctgcgcgaagagctgtgcgacctgccggacggcacggtgtgcttccgcctcggcgaaaacgagcgttgcccgttcctcgatgacgacaacctctgcgagcttatcttaaagcttggcgatgatgctttgtgcgagatttgccgtgaacacccacgtttttatgaggagctcggcggccgcgtggaaatgggcgtgggcctttgctgtgaagaggcgtgcagactgctgtttgagcagaaaaatcccgtcacgttcatcacaacgaatgtcggcgagctgccgaatgcgccggaggatccgcttgtgttccatctgcgggacgaagcatttgccatcgtgcaggaccgctctctgccgttgcgcgtgcgcatgcaccgcctgctcgatttcggcgtgcaggcgcagaaaacgctgttcggcaatatgtcgcctgccgaacgcgagaagaccgatgagaccgatacccgcgccgcgctgtttgacatgatgaccgaaatggagccctacgacgaaacatggcccgattacgtgcagcttttggaggataacggcttgcaggcgaatctcgacgacatcgacggcggctacgaaaacctgcttgtgtatttcctgtaccgccattttgcacacggtgtgaccgacggccgcatcgcggcgcgcgtgggcttttgcgctgtgagtgtgtggttcatctgcctgatgaacacaaagtgcctgcgtgataccggcgaattcaccccgtgggaccgcatcgtctgcacgaaagactactccaagcaggtggaatacagcgccgaaaacatggaaatggcgctcgaggccctgcacaaagaccccattttttccgccgaacacctaaagcgcctgttcggataacaaaaacctcgaaaggagctatgatcgatgaaccgatacgttgtgcttgcccgttttgataaaaatacagaagaaaaactgattgcgctgcgccgcgagatgacaaacgcaggctatgcgtcttccgagtggccgccgcatatcacgcttgcggcgtatgaagatctcgatgccgaagcgctctgcgactggacagggaagtttgtccgcgaacacacgcgccaaaagctggcgttcggctctgtgagccttctgccgccgtatgccacgcaccgcgaaaccgccgtgctgtgcctgaatccggtacacgcaaagccttttgtcgatttttactatgcgttccacgaaaaatacgagtcgttctgcaaaggcatcggcagtttctccgccgtttcggaggacaagcccgtcatccactgtacgctcagcgttgtgcgcattacggagctgcaggacgcgctcgagctcgtcttccaaaatgatgttttcacccaagccgaagttaccgcgctggagatctacacctatcccatgcgcctcatcaaacggtttgacctgaccagagcgtaaattcaaaatttcaaaagcaaaagcacgcagtgtttcaaaacctgcgtgctttttgcgtataatcattcaaaatacagtgtgcccatgttcagcaatctcgtcaggcgcgctaaaatgcgacggagggtaggcaggagcaaaaaggcgaggagaaagttcgagacaccgtggacaaggtcgaacggaatgccgctgatgatatacgccagcgttgccgcggggccgcttaaaatgagcacgggtatcgcggtgagcgtgccgaaaatcagcccgtaaaacccgcacagaagcccccagccgaggcggctttccattttacgaaacagccaagcggcgacggccaaaatcgcccagatgtagaggtacgaaaaccaccacagcccaaaaccgtacagcaacccctcaagcagcacgaatacggcgagcgtataacccacgtatggcccgagcgcaagggtgaacagcaccgtgagcgatgaggcaagctccacgtttggcaaaggggcaagtgccacctgcgaaacaaacatcagcgcgcccaaaatgccgctgagtgccacgcattttaagcgcaaattaataccccaccgtgagcgtgaactcgtacttgcctccgtcttcgaccggggtggagtcgacgccggtggaggccatttcaccgttgattgtcagacaccaccactcctgattcgcgctgtcggcttcaatgccgtccacttttgtgacgaacaggccgtattcgctctcttcgccttcgataaggtcggcatcctgcaaagcggtaccgagcatttcttcgtccgtgttgagattatgcacggtctctttgccgtcggcatcgacaacggtgagcgtgtaggctttagcgcctgcggtgcccttcggcaccgtgacctgccagatgacaacgcctgcgacgacgagcacaacgaacacgatggccgcaataatgagcggcttctggtttttggttttggttgacataattttttacctctttcttgttttttatccccaaacaggtgaattactcggctgtgttttccactttttctgcctgctctgtggaaactctttcgggcgtttccggctcgccgttccaacgggcgataatggcttttgtcttgatgccctctgcggtgaacatcacctcgtgctcggactgaatgttgcccggcgcgtcttcgctgtgcaggtcgtccgttttgcagagaatttcaaaccctgcttcacttaaatagcgttgcgtcgcaaggtacaggtcggtgttgtcggttttgaaccacagttcgccgccgggtgcgagcacctttttgtaggtgttcagctggcgggtgtgggtcaggcggcgcttatggtctccggccttctgccacgggttgcagaagtttacataaattcgtgcagctttttcactggacgcaaaaagtgtatccagtttttcaatgttataggaaagaagatttacgttttccacgggatcctcgccgaactccgcttccatgttgcggcgggcaacgcccaaaatatcttcactgatgtcgatgccgatgaaatttacgtctttttctcggtgcgcaagctttgccaaaaacgtgcatttgccgcagccgaggtctaaatggatgggctgctgctttttaaagcgctcgccccatgttccggcggcggttttcggctcgtgcacataaaacgggcacgcggcaagttccgggcgcgcccactttttctttcggattctcaaaattttatcctcatttcttttccgttattttcgctctgcctattttaacgcagaaatgaaaagtgtgcaagtgcgattctgttttttccccgttttgcgcgcttttttcttctttttccattgaaaggcatcgggcattttgctataataagaaaaagcgcaaacttagacttacatatcactttatatgtcaaggaggaaaacgtgatggacgaattaaaaatgcaaaacggtgctttaattttggagggcggctctctgcgctcgctctttacctccggcgttttggacgtcttcatggagcacaacttatatttctccgatgtgaccggtgtgtccgcaggctctttgaccggcgtgaactacgtttcccgccagccggggcgttccgcaaagcttaacatcgactacgtgaacgacaagcggtatctcggcgtgaacaatctcatcttacaccacgagatctttagctttgactttttgtttaacgatttgtcacgcagcattctgccgatggattttgacacgttttataaatcgccgcagcattttaccgccgtggcgacgaacctaagaaccggcgaggcggaatactttgaaaaaagtgcctgctcggatattttggcagctattcgcgccagcagcagtatgccgatgctctcgaaagccgtgaagatgaacggcgagctgtacctggacggcggctgtgccatggcgattccgtaccaaaaggccatcgatgacggctttgagaagatcgtgctggtcttaacgcgccagcagggctaccgcaagctttacacaaagccctctatgctgcgtttgtatgcgaagtatttccggcatttcccgaagtttttgagcgcgctgtacgccgttccgacgcgctacgacgcccagcaaagggagatcgaccgcttagagaaagaaggccgcattttcgttatccgcccgcagggacccgtgaatgtttcgcacacggaaaaggacacggcgaaattaaaagcgctgtacgaggaaggccgtcaggaagccgagcgccgcatggacgcactgaaacggtatttggaggcgtaatttgcaaaaggcgccgtcaaattgacgattgtaaaagattaagcaaagcccgcagactcaaaaaatctgcgggctttaacgaaaaaggactctgcaatttgcaaagtcctttcgtttggtcgaggtgacaggattcgaacctgcggcatcttggtcccaaacttatcgggaaaactttttatgctcgtttatagcggttttcagtgctttttaatttgttttacttactctttgacgctcttatctccactgtgtccgcatgttccagcgccgtctgtggtaatctatgtggtcaaaaacgcttcccgcccgatttccggtgaatgttcaccgatgccggacgggaagcgtttctcgttgctgttggctgcattgtaactctgagcaggcgattatgcaagttgtttctgagcagagggcggctcaaaggttgagccgctatagacaaagaagagtgagtttacagcatgaaaataatcgcaggctcttttccatcaactgagtataaatcccttaatgaaggcataatagtaagggatttatggcacagcccattgactattcccttattttatattattatttaagggaaaacgaatggaggtgaggaaatgagaaccttcaattactccgcaatcaaggagcagaagtgggacttggatgttcttggcctgattgcggccatatacaaggaagccggaaagcaggaactgtatttgaggcagcgtccggaggagctcgaaaagctcgtggagattgccaagatacagagcactgaggcatcgaatgccatcgagggcatcgttaccacgagtacccgaatccggcagcttgtcgaagagaaaaccacgccgaggaaccgtgacgagcaggagattgccggataccgtgatgtgctgagcatcattcacgagagctttgacgcgattccaattacgcggaactatatcctgcagcttcacaaaatcctgtacagccacatgaataacccgcttgcgggccgcacaaaaagcgtgcagaattatatcactgccacctatccggacggtcatgtggaaacgctgttcacgccgcttgctccgtatgaaacgccggaagcgctggacagaatctgtgaggaatacaaccgcgtaatcgggaatatgaaactggagccgttgattgcgattccggtttttgtccatgactttctgtgcatccaccccttcaatgacggcaacggaagaatgagcagattgctcacaacgctgcttctgtaccgaaatggtttttatgttggaaagtatatctcccttgaagccaaaatcgccaaaaacaaagatctgtactacgatgcgcttgcacaggcgcaaaccggctggcacgaaggcaccgaggatgtagtgccctttatcaaatatctgcttggaacaatacttgcagcctataaggactttgaggatcgtgtggcgcttgttgaaaccaagctgcccgcactggaaatggtgcgcagagcaagcaataatagaatcgggcgcttcagcaagcaagacatccgggagttctgtccaacgctcagcgacagttccatagagggagccttgcggaagttagtcgccgttggtgaactgaaaaaagaaggaaaaggtaaaaacacctgctatttcagactgaattaaatttccgtcaaattagagggccgcacctgttcatacgagcaggtgcggcccttttggtcgctttacggaagttggcgtatagttcaacggttgagccgctatagacaaggaatatacccaaagtcccctgccgaaacacactcgccttacccgaagaaatactgcttcatatctgaggtgccaccattcttatcgcagaaccattcgtaatcagcgagacagttctggcagtgggcaattacatcaaatccgcctggtgaatgctggttatcggcaatgctcatgacctccaagggcttcccgcaggctgggcagggtctaatcttcctcgccttacgagtggcacgctctctctgctctgtttcaagtgcatctaaaaggccctgccaaagatttggattcagttcatgctctgcatagtcttcaaggtgccgcctaatctcatcggcagccagtacgagaaacttatcatccagaagctaaatgtgacgcttgatataatcagcgactaccatgggcatacaagtattcctgcccatcgcataccgcattgccgacagcaggatcaagcgaaagtcagagtcgcagatcggggcgagcagatcctgagggaacagcagaaactctttgccattattcatgcatacgcgcagcggtcgctgttcttccgttaccaggttcagtaaactgttagcttgacctttcaactcatcaacggtaatcgattcgtagtcctgaaacgggtttacttcataattcatcatttgacctccaatcagtttgtcctcgttatgaggtgttggcattgtagctctgactgtccggaggttcaaccgtttctttcgcggcttgaaaagaaattgaatagagtcggaattcgtgcggatttatcattttcttgccttttctgaccgaatgtgctatcataaaaatggcgctgtcaggcgttgaaatatgccctggtagtgcggctgtaatagctcgaatgctctgccaggtggcagagcattttatatatcggcacggaggagagactttatggcggttagttataaaaaactctggaagttactcatcgataaggacatgaagaaaaaagacctgtgtgaaaaggcaggtatcagcccagcctccgtcaccaaaatgggacggaatgggcatgtcaccacggagatactcgtgaagatttgcgcagcgctggattgcaggattgaggatattgtagagattgtgccagatgaaaagcaaccatcaaataaagcggagccgggggtgatgagatgactatcgtagaatctattaagtgtgttttacaacaaaataatgatggtttgacctcaaaacaaatatatgatgagattattcgtcagggattgtattcttttggagcagagaatcctgttggtgttgtcaatgctcaacttcgccgtcggtgtatcggtctggattttccgactgcttacccgataaaattctttgaaattgcgggttatgaaggaaaaaagatcaaattccgtttgatttcgacagaaaatacagccactattattactgctcccaaaactacagatatttctgaactgttaccggaagaaaaaatcaaagctgcgctgcaggagcatttacaaaatatacgacaacaagtatttgattctgtcctaaacaattccccagagttctttgaacatcttgtggttgacttgcttttaaagatggggtatggatatgataaaaattcgggtattgttacaggaaaaccacatgatggcggaattgatggaataattagtgaagataagctcggcttggatttgatatatatccaggctaaacgttttgctaatggcaataaggttacccggcatgatttacaggcctttattggcgccatggaacatattaacaaaggtgtttttattacaacatcgtcttttacgagatctgcaatacaattcatcgagaagcaacagcaaaaaaatatcaaattaatagatggcaatttacttgcagatcttcttgttaagtatgaggttggcgtggcagcggcacaaactttcaaattatataaactcgataccgaatattttaacttttaaatcattcgcctaatccggatatagagataggagctttattatggcggaaattgttggaacaattactaatctgagtgattttttgtcgaaaacacaagtgtgcttatccgtaaagcctaatgatcctcaacagcaaatcatttgcctcgaggcagataggaagtattctatccctgcttttcagagagaggttagatgggatgacaacaatcttaaaatgcttttgtacgatttgtctcgcagcagcaagtttttgggaaatataatattaacgattaaatctgaccacacttgtgaaattattgatggtcaacaacgtacaactgtacttatgttgattgtttcctgtataaagaaaaagtttgggaccaagatatcgacgccagatctgtgccctcttcgcaatgaggggtttacaggcttccagacactcttagaaaaggcctttgatcaggaagcaattacatccgatgattggaacgctattcttaaaagcgatgattatcatcaacttcctcgtattcaaaaactatggaacacgatatcttcttccgagttgttagctgaccggcataaagcccaggggcttcttgataacttgtgcaaatctgagttcaatataattgccagctattctaacgatgtaaataccagcatccagtattttctggatgtaaatcttaaaggcattcgtttggatactgaagatattttcaaaggttatctttttagtcaggatagccgcgaactcacacgttctctttggcaaaagaataagcgtgatgtattacgcttaaatggcgtcacgcagagctcggaagagaaaagatatcctctgatgaagttgtatgaacactttttctattgtgacttatatcttcctcgcgagggagattgcgagtatagtacactcaagtttggtgaaaacttttgtctcacatccggatttgaaagtggaagtacgaaatattacgaaggtagccatttaattgaagccatacgagatcgggactatttgcaaaatgtactctccagactcaataaatgcgttgaaataatgacggatattattgaaagcgagggaccttctactccgtttaaagacaaatttatttgcgctaaaaaggtagattctatagatattcaaaactgccattcgatgctaaagaagatacttatggaaaaagaggtgattcctaaaattttagcgttaaagtatatccttacatactttgacggaaagcctcacgcaaaagaagagtacaagtcagtctatagcgtcttttgtgcagcggtcttgtttaccgttttcgcaaacaaaaaagagagtgatactttctacaactttgtaagactggaagaatggaaaagcaagataaacaaatggctttatgactatatttcttctcatgcactgaccagaggtaaagttctcgctgcatataaatatagtgaaagtgacgatgacccaattcaacaaatccgttgtaagtctttggcggcgattagtaatttcttcaaagtaacgaagaacggtgataattataacatgggtatttccaacgcagctgaactttgtaagttttttggagataaaacagtttatagtttagaacactttattgtaggagaatgcggaactcttcatgtcaaaaccgcaaaatacgatttcccatataaatatccaccaacgattcagaagtacagaaattctctatttaattttatttttattcctcaaccgcttaatagttctctttctaatgaaggattgtttattaaagtagcagaaatccatacacatgaaaacgagattaaatgcagctatagcaaaggatactatggactgttaaacaaatctcctcgtatgtactttcaacgctaccctaccgaaaaggagatagattccttcagtactgaagaggatgccagagcatacctaaatgaatattttactaaaacatttccggaagagtttttacagttttcaacggcgcttgtaaaaaaaatcaactggggttcttaacacgaaggcgttctcggatatttccgagagcgctttctcattaaatgcgcagcatggtaacgacatatcttgcggaaactattattgtccattttattgtacttgctttataatatcatgatctttaaagaaagtcactttctccataaaacctggtgtgtgcagcattttattaccggtactgtgttgactgttggtgaattttaatatatacttaagtatatacttacgtataaatagaggtgctatatgctgaaatatcaatttcccgctgtaaagggctgtcaggccggaaaagattactatatatgcatggttccccttgggttaatgagtaagatttttgcgaccgatagcagcgatgtccctgccgagtatcgcgcccaaagaaagctcaacgaagctcgtattcctgaaatctgtggatacatcttgtctaatcgagattcgtatgtcttttcagctctggctgcatctgtggacggtgacatgaagtttgtccctgctgacagcaatgagaatgcaggccttctggaaatcgatatgaccgcttccttcctgatcaacgatggacagcatcgaaaggcggccattgaggcagcgattgccgaagacgagagcctgaaagaagaaacgatttcgattgtcctttataaagaccagggacttcaacggagccagcagatgtttactgacctcaacaagcatgctgttaccacatcgaaatccttaaatacactatacgagtcgaaagatcctgtggcactaatcacgaagaatgtcgtcaactcaatcagcttcctacgtaagtatactgacaaggagaaagacaaccttagcaaatattcctctaacatctttacacttaacaccttctatacagctaacaagcgcatctgtaaggtgatccatgatcaggacaatgctgaaaaactcgtttatacattttggaatcacgtggttgttaatatgcgtgagtggaacgagatggacagtggtgaattaagtaaaaaaagtttgcgagaggattatatcacaacgcaaggtctgattatcttggcactgggacgcttgggagaattctattgcgtgaatcctcagattaacatggcgaagtcgttgaagggattaaagaaaatcgactggcttcgaaataatgaagcgtgttggatgaaccgtgcaattaaacctaatggaaaaatcaacagaaatgaacagggtatctttttgacatacattcagattaagcgacttctttctctgccagtcagtgatgaggagacaaaaaaagaaagaatcatcatgggataaccccggaggactcaaatggaacagaatacattaaattcaaataacatcgatgctggaaacaaaattgccagtttccgagtaaaacaaagtatgccatatgaatttaaggtgaattatgcgcgcataagagcatgggaattctataatgaatgtggaaaaagggacttggattgctatgtttcagtagggggacttgacagtatcacactgttcttcttcttgaaatcaataggaatagatgtgccagcggtatcagtctcttcgctcgaagatgttagtatccaaaaaatccacaaacagattggagttatctcactaccaccagcagttagaactgatggtacgcgatggaataagcaaaaactaattcaagaatttggtttccctgtactctccaaggaaatcgcccgtaaaattgaattgcttcaaaacccaactcccaataataaaaccataaggcatgcaattgttacaggcgaaactggtgaatatggtggatttcaaaagcattcaaaaatgaaacttgcgcagaagtggctcgaaaaattcggcggattagaaaatgaagaagaaggcgtgaattatcaaattgcatcgtttaaagtctcctcgaagtgttgctattacctcaaggaaaaaccgtgctctgattgggctaaagagcacaattgtgtaccgtatttagggctgatggcatccgaaggtggaagacgtgagaagtctttaatgctaaatggctgtaactactttggaaagggaaccattcgttcagcaccatttgcaatttttaatagacaggatttattacagttggcacttgatttaaaggtccctgtccctgagatttatggaagcatactgaaggatgaagatggtcatttgtatacttctggagagcagcgaaccggatgctcgatgtgtggatttggaattcagctcgaaaaacggcctcatcgattcgatcggctacgggaacggaactacaaagaatgggatttttggatgaataggtgttgctttgatgaaaacggaacaccgtatggctggggaaaagttttagattatctcggaattgggtggagagatattccggatccacataacagaaaaaagtaaggatgggaattcacaatgccatatacaggtaagtttcaagtatttgaagatatcattaaagaaattatgatcgtctacaagcacgacagccgtccgtggcttattggctacagtggtggcaaagattctactttgctggtcagtcttgtatatgaagccatgaagcggttaaaggatgctggcgctaagcttgacaaaaccgttcatgtcattacatccgacacgatggttgaaaatcccatcgtaaagaattacatgcactcatcctcggataacatcaaccgagcagcgggaaaagatcgtctcaacatcaaagccagtgtgatctacccggagccggaacagacattctggagccgggtcattggcctgggctatcctaccccagagcctcccggattcagatggtgtacagacaggctgaaaatcatgccgatgaataagtttgtcaacgagcgaatcaaggagagcggcgaaatcatcattcttctcggcgtccgcaagggcgaaagcctaactcgaatgaaggccattaccgcacgggaaatcgaaggcaaactgctgaatatgcataatgacattcccaatgcttatgtctacaatcctatcactgaaatccctaacgatttggtctgggaattcctcttaaaaggtgattgcagaagtccttggggaagtgacatgaagtatttgttcagcctttaccagggcgaaaaccttggtgaagaaaagagtgttttgggtgaggtcgaccgcgagaaaattccggtaaccggcaactccagatttggttgctggtgctgcaccatggtgaaagaggataagtcgctacagaacttcatcaacaaaggtgctacggaactaattccgcttagagaattcagaaacgaattgctcagaatgcgggagaatagtcaatatcgagattctaagcgccgcaacggttctgtctataagaagtcagacggaagctttggaatgggaccgtttacgcttgaagcgcgatgcctcattctcgaaaaactcctcgacctcgaaaacaggacaggcatggagctgattacagaagctgaactgaaagcaattgacaagatgtgggacgaggaaggcgaccttacatgtcgagcactcgttgaaacctaccataaggtcaaaggcaaaaagcttccatgggatgattataaaactccgcgatttgatgatgaggcgatccaagcgatcagaaatgttgcagataagtatgatatcccggttgaattgattacgaagctgattgtttctgtagataccaataagcacattacgaagaacaacaaaatgcaaaaggcatttgacagcattattggacaaggctggttgcactataattctgtcgagggagcattgaaccatgaagattaagcgcatacaagtaaaaaacataggtccatatgtcaacgaaaatgccttcgattttgatgtatcagacattactaaaagaatggtactgatcggcggcaaaaatggtgcaggtaaaacgacactgtttaacgctatcaaaatatgtctctacggctgcgttgcatatggctttgaatcaaacaacgcaaagtactttgccgagatagagaaaattatcaatgccaatgaaaaactgcaaaaaattggtgaggcagaagttgtcattgacttgctgatggatgacggaaagtacgatcacacatacacgtttgtcagatcatggagggtagcaggcaagaaaatagcagaaacctttactgtgtacaaagacggcgagacactttctgagacagaaaagagtgattttgagagctatcttttacagacactgccccccaatctcttccgcttctacttctttgacggcgaaaaaatcagtgatttcgtgttcaacagcagcaaaaactccgactttaaggatgcgtttttaaagctctgcagccttgatacgatggagattattcgggaaaacttccgtagaatttctcgtagcaaggcaaaggggaccatgacgctttcagcggaatacgatagatgccttgaagcagacaatctgattgcacagagagtagaatgcgctgaggatgaatatcgagagatttccaatgagattttgattattgatcagaggcttgcgtctcttgaaaaggcatacgccaagggtggcggtatttctaaaaaagaatggcgctctatgcaagatcagattgcaaaagaggatgctcgccgtgagggacaccataaatggctcaaagaaatggccaataatgtgctcccatttattatccttagaactcaactggaagaactaaaggcccaaattgcactggaacacaaggcacaggtcgatgcaaatgtaaaaagcacaattgataccccggaaatcaagtcgatcatctccggcgtgttgagccgggcaaatatagaattagccgacgatatttctgaaaaggttatctacgagattgccagctatgccagccacacttcacagataacgcccattctcaatttgtctgacttcgacagatttgaactaactgcaaaaatcaacagtctcctggcttatgacaccaaccgtgtcaaagaagcgactgatgacattaaggcttctttaaaatgcgtaaaacgcatccgaaagaaaatggagcggagcagtatcgaaaactatgatggatacttgcagatgaaaagcgatttgaatgagcagaagtccaaatgcacgcaacagcttctggaagtagataaagaattgcaagaactacgcgcacagaaagcgatatctgcatctaaactttccaaggctaaaagtgattatgaggcactcttgaaaaagcagtccattaacgatatttcagcgcgtgcactactggcatttgatgaactccaaaagacgctttacgataagagtattcgtttagtcgagacgggatttagccaattcttcgcaagtctgatcaataaatctgatttgattgatggaatccatatcgatgatagtctaaatgttcttccctataaaaacaaacactttaaagctgatgaaatacgtaaaatcattggtaagaacggtgttgagtatcttattgctcaaatcggcctgtatgcttacgaagtcctgcagcaaaagcttattgccggtgaaaccgagtttgaactgccggttgaggtaaagcaacagctttctgcaggagaaaagcaaatcttcattatggcactatatcaagcactttcgcagctcaacaaaatcaatgtgccttacatcgtagacacaccgtttgcgagaatcgataaggaacatcgaggaaagatcctgagtcagttcttcaaaaaactcaatggtcagattatcatcttgtctaccgatgaggagattgttggtgagtatcgcgagagcatatcggacatcatttccaatacatttgtcttgaaccacacagcaaacggaaatactgaaatcctggcaaacacttatttcggaggcaagcacaatgactaataagcttcatacgtcacaaaagacccaggagatattcaactcgttaggtcagtcattgagattgcagccatttatcctatctaaactggcaatcgcactgtcggtcagaaagggacaacttcaagccaatgacttcaagactgataataatggcttggaactgagccggcaggttattttcggtgatcacgatttgctgtttaaatctctcattattaacaacgagggcaaagtgattcgcgaggatgactatttccccggtttggtaaaggctcatttggatcgaggagcaaagcttctcgaagacgaaaaacggtacagcaaagatttctataatcatctgtgccatctggatgacaacatctaaaggaggtttatatggattatccaaaggtcaaagtctgtttagatacctcagaagataacctgatagatgaattgtacacgccgtgtctaaagtgggctgaacgctttgaccgaggcgtcggctacttcacaacagggtggctcacatacaacgtcgcaggattatccgacttcgcctctcgcggaggaaaaatgcgcttaattacaagtcccattctttccacggaggacacggacgcaattattggagctgagaaccaagatggtagcgcattcctgcgcctcgaagcagctctcctcgaaaatgttgagatactcaaacaagaaatggaagcagatattataaatacattttcctggatgctgtatgatggaattattgatatgcgttttgcaattccttgtgaaaagttggaggaaggagactttcacgataaatttggcattttttataagggcaacgatgcgctatccttctctggctctatcaacgacagcaagcatggattccagaattatgaaagcataaaagtcttcaaaacgtgggctggtacacaggagtatgtcgatgcggataccgctcgtttcgagaaaatctggaatcgaaaagaccgcaatctcaaaatgtttaccattccacaagcagttaaaaacaaaatatttgaattgcgttccccggataggccgtattctttgccggcaggttcgagtaaatgggttcatcaggacatagcagtaaagacctttctggaaaaagagcatggcattctggcaatggctaccggaaccggaaagaccgttactgcaatgaaaatcatcaacaagctgtttgatagcggggaaattcgtcgcgttgttatcactatgtacggaaacgatttgctggatcagtgggcaattcaaattcgagaaaactacaagaacaagcaaatcaactatcattatgcatcccagaagatgatgaaagatttcgtcatgcacccagatgattccatcttaattctttctcgtgacgccagaaatctctccaaattgctggacttgtttgatcgtctacctggcgattatcgcaatgatacgctgtttgtttttgacgaagtacatggagctggttctaatacttttgtcgaaaatctttcgggcaggctctctccgtatcgatatcgcctcgggttgagcgctacgccagagcgtgagtacgatgaggctggaaatgatttcttgctgaatgaaattggagaagtaatttttgagtttacgctgcaggatgccattcaaaaaggaatcctgtgcgaattcaattatattcctctgccctatgttctctctgacgaagaaaagctcaaaaagcgcaagattatcgcagcgttcaatgcaaaaaaggagagcggagaacctgttgatgaaaaggatatgtttactcaattggcgcttgtcaataaaacagcggtcaacaagctggaggagtttgaaagtctgatttctcagcgaccggagctgttgcagaagtgtatcatttttgttcagaccatggaatatggcgcaaagctccaggagattcttgtcaggtacagcgacaaatatcatacctactatgccgatgatgaaaaaatcaatttggagaactttgcggcaggaaaaattgactgcctgctgacctgtaaaaaagtttccgagggaattgatatcagcagcgtcacgaacatcatcctgttttcttctgaccgttccaggctcgtgacaacgcagagaatcgggcgcgcattacgcctggataaaaacaacccagaaaagaaagcaactgttgtggacttcgtgattgaggattccgaggaaaatgacaataacgccgatgccgatcgtgcagagtggcttacagaactttcacagacaaggagatgcgaacatgagaaataaaatcatcgaaaatgcgattgattccgttgtcaacgcatcaaacacctcgtccgacttcaaactggcattcagacaatatgtcaaaaacaagtttgatgataacgccaaagagagcgatttaaaacggatacttacactgattgaggatgatgaggaggatattcaggtatgaagatggcaatcctcgagctcgaatataaaaatatccgaaaaatcactgccttgaagctcccctttaccaaagccgatggctccgtaattagcaataattttattatgatggcaaacggtaccggtaagacaaccacaatggaactcatcaaaggattatttgatggaacagccgctggatggactgcgtccaaagtgcgttctttcgcgcctacattaacggaagcagatacaggtgaattcagcaccactgtcaaatttgatgatagacagtataagtacttcctctctatgaattacaaagatggaacggtgcaggtggaaacctctgctcctcccaagggtcgagaagctggacttcgtttacctgagtctattcgcggtatttttacgcctgaatttgttaggcgctttgtgtttgacggtgagcaggcggcgaagtctatggacagctcatccaatgaagctgatgaaacgattcgctacctatatcgcctcgatgaattggatgagattttggccgcaaaccagagaatccttaccgaaatccaaaacgccgaaggaaagcgtggaacatccagttcacttagcaatttgcgtacccggcaaagtgacattgacgcaattcgggccaagctgagagtacggtgtgagaagcttcgcgaagagattgctgcgtttgaagctgaaaaagtagagaaggagaaacagcgccaggaactcgacaagagctatgaaaagctgaatcaagagaaaaatgatattctcaaggaacagcagaagaatcgcggcggaatcgacgttaagatcacttctattctggggataattaagtctccctatctactgagcgaaagcctctgtgcgagaatgttcgagttaggcaatagcatgaaaaaactcaagttgcctaaaaccattgccaaagacttcttcaccgaattggcttctgcagaccggtgtgtctgcgatagatgcattggcgaacgggagagaacggctatcctgaagcgggctgaccagtatctgggaagtgaccaacagtcggttcttaacacggttaagagtagtctgatggacagtgtgtatgacgaacgcttaaaaaaggccttcgaagaactcgaggaactgagagctcaagctaatcgcctcgatacgagatttaaaactaatgaggaaaaactcattaaagccggaggcgaaaaggctcgtgaactgcaggagcgaattgaggaactgatcagacttatcagcattgctcgtgatgaacttgagcgcattgaatccaaggatgaaaacgacgcttctctgacagaagaaaacaaccttcacaaggcggaacaaaaatttaagtactacgagcaggaaatagcgaaggcaacaagaacaaatactgcattgcgcaaaaaagagttggttgattccttggtgaatgagatcaaactacaggctaccacagcgctgaagcaagaaatcgtcagaaagaccaacgagaaacttcgccgtgttatcgttgacgattatgtagaaatcgaaagcatcgataggtacataaaactaaagggtagggacggtgccagcgaaggtcaaactcttagcattgcctactgtttcctgggcactcttttcgaagattctgagttggaatttccgttcattatcgactcgcctaccggcaagatggatttcgaaaaacggcaggctgttgcagatatcattcctttggtattcaatcagatgattgcctttgttcagtcagcagaagtggagcgttttgcggacagattctatgcaaatcccgattcgcagtatcttacggttgtggcatctccccaggatcaggccgtagttgtttatgaaggaattgacttcttcgattcgtatcaaagagagcacaaaggagatgaaaaataatgcattttaagatagcgaaaagtgcccaaagctactttaacaacattatgaatctcgaaggctcccacgctgcggaggataagaataagtttatccaattcgatgtgtactactgctgtgcattgattggcatggcagcaggccaaatcgacgaggatacttcggagttgaaggatcttgttgaaaggtacccagttcaatatcgtgactgtaaagcacaaattgctgggttactggtggcatctgaggccagaagactcggcatcgatacgcagagccctaagctggagcagattatgctacagtatcttagcaacaatgatactctgctgtctgaggatggaattaaaacccttaacgcctatgcgttgaaaggataccgcctgattactgattatccgttgtttgacaaacctacttccagagaagaatttctggatgcattcaatgtagccatgcggttttacgaaaagaaagatagctaatctgtgtaggtgcttagttaatctgcgagagcgcaccacgaataccccacagccaaaatagcggctgaaacgcaatgttccagccgctatttttcttaaggcagcaccgcacaattgctgaggcaagcgctgtcgaatcacccatcaggcaggaaaccataggcttcccggcgcatttcttcgcgagagcgcacaacttcaagccgccaggcagggcctgtcagccagaagcagattcgccaatgcgaacatgatattgaatttggctcgctgcttttcgagccctcggtatcgcgtttttcgaaattgcagctgtttcttgacgacaccgaatacgtgctctacttttgcccgaacagaagactttgcgtgttctgctttctttgcggcatactggccgctcttgctcagcttttttaattgagatggacgtcggttaattttgtatttgatcttgcgtccggatttgttccgaacgatcgcgtcctcacggttcccggctccaagatagccactgtcgccgtaaacgacatcttcctcaccggtcagcagggatgaagtctgcgtcacatcatggacattggctggtgtcgcctccactgtgtgtaccagtccgctgtccttatccaccccaacatgggctttatagccaaagtgccatgtgttgcccttcttgacctgatgtgcatccggatcccgctttttctccttgttcttggtggaagacggcgcggaaataatggtggaatctacgatcgttccctttttcaggataaggccctgttcagtgagcgcggtaacaacttgtgcaaacagtttctcctgcagtccattcttcaccagcaggttccgaaagcggccaatggtatctccgttcggcacctgattgctggaatcaacgccgcagaactctgaaaatgcccggctgtcgattgcctccgccgctgttgcttcatcactcaggtcatacagattttgcagcagatacaaccgcagcatggtctccagtggatagggtttattgccgcgctctcctttgtaatagcacggctggatcagcgtaagccattccttccatgggacgatccgttcgatctgggctagaaattctttcttctttgtccgtacctgcgccagctcatcactcagcgcagtcattgtcatctgtttatccatggtcttattatatcacttctggcagtatcgcgcctacttttctgtgcggtattgccctatattttcctcgttttttcattcttacagcataggcgaaaagccgcctgatgataatttcattaggcggctctcatttgagtttacaaatttaatttttgagagaaacaagttctcctgtttccgcggagcggaatgcagcttcgatagttttcagcactttccgcacctgccagggctgtacgatcaactctgcttttccgtcgatcgcatcccgcacatttttgtagtattccgaccaatcggcttccacgtccggaagctcactctcaagcttcacgttatccggcctgggcgcaaacgtcctggttggaccggccgaggtcataataatctcagactttgtctccactgtgctgtccagccggatgatcccgccgcttctggaaaaatcgttcacataggcagttgcctcatcgccaagcagaagccatcttggaagctctttgagtacaaatgtccctatctccacttgaacgtgactgccatcctccaaatcaaacacgaggaagaaatagtcctccacctccgtagtttttacattgctggtcttgcagaatacgctcctgaaattgtcatatcccagcatccacatcaactgatcgataaagtgaacgccccagtcgtacaacatgccgccgccgtgcttcttttcaccgcgccaaccgaacattactccaccggatccatgcagtctggactggatggaatacacctttcccagttccccggaatcaaggatatccttaacgatccggaagtccttgtcccaacggcggttctgatgtacggtgaagagtttcccgttgcgaccagccgcggcaatcatctgatccagctcgtccacgttcaaagcggcaggcttctcgcagatgacatgcttgccggcattcgacgcggcaatgcagatctccatgtgacagtcgttcggcacggcaaccagaacagtgttgatgtcctcacacgcaagcaaatcctccagggacgaaaatcccctgagcccgctttcctccgccacctgtacccgcacggggtcaatgtcgtaagcgcctaccacctgaaccccttcaattttggaagcgtttcggtgatgaaatccgcccattcctccgtagccaacaattcccaattgaatccccatgttcattttcctccattctttgctgcatttttgcgctgcgtttgatttcctgaaaacaactttcatccgatcggatgggacaaattcacaatcatgcccggccttttgaaaacattatatctttcgaaacacatacttacaattaacatgattatttatcctcatatactgttgaacaactgcagcattttaaaaagatgttccgagaatattttccttggaacttgaaaatatggtatccgctcaagtctcctcaatccatatctctttgccagtcgcacagttcagtggaatatccggttggttctggaaaatcagacagcttgattccgtcactccgtaatttgcttcaaaatactgttccgcataacatttcataaatcattaattcataaaacttgtaggccttgcagatttggaaatcactcactttagaataaaacagattttccctcgtgtcttgctgaaatcaattttggccaatatctgacagctttttaaggcaacaccgcacaaagaaaaaatatgatataataatactatggataagcagatgagtctgtcgggcctgagcgatgaattgagccaggtgcggacaaagaagaaagaatttctgagtcagatagagcgcatcgtgccgtggggagagtggatcgaactgatccggccgcactattacaaaggagagcgcggcaataagccctacgatctagaacggatgctgcggatttatctggttcaaaacctgtatgatctgtcggacaaggcaacggtagcggaagtgatcgacagccgtgcattctcggaattctgcggagtggaatcgagcaatcaggtgccggacggagatacactgggtcggttccggaatttgctgctccgcagcgggctgcaggagaagttgtttgcgcaggtggtatatctgctgcaggaaagaggcctgctgctgaagaagggaaccatagtggactctaccctgatcgcagcgccgtcctcgacaaagaacagggaaaagaaacgagacccggaagcgcactcggtgaaaaaggggaacagctggcacttcggctataaagctcacatcggcgtggataaagacagcgggttggttcacacagtaaaggtcaccagcgccaacatccatgatgtgacgatggtgccggagctcttaaccggcgatgaggacagcgtatatggcgacagcggctgcctgggcgctgaaaagcgggaagacgccgttcttttcaatgtcaatggccagggcaaaaggatccgttacaaaatcaacagacggccctcgcagagtaaacacgcagacaatcgttcccgcgggcagatcaaacgccgcgaaaaggagaaatcctccgtacgggccaaggtagagcatgtctttggggtagtaaagggccagcttcgataccggaaaactaggtaccgaggtctgcgaaaacagattgccaaattgaatatcctgttcgcgctggcgaatctgattctggctgacaggcgatcctgcctgacggcttaaatcagtgtggctgcagcgctgatggaatggcgtatatatgccctgccgggtggaatcttcccacagggcctttccttttgcgtgttctgcggtgttgccctaaaatttcagagagggatttgatctcaaaatccacctcgacacaccgggttgcaaatgtgtgtctgagggtgtggaaatgtaccccctccagattgcagttctttgtgtactccttcagcctgttctgcaggcaacggggttccatgaactgatcttcagttcccgttaaaagaaaggcggcggggttctttgctttccaacgtctgcaaagccccgccgcatattctgtcaatggaatgtctctgatggaagtctcacttttgggttcagtgataattaccttcgttcttgtttgaccttcctcactggtatctttgatccgctgcatagtgtaatgcacatgaataacattttcggaaagatcgacatccgaccatcgcagcgcacatatttcgccgatccgcatcccggtcatcagtgcaagcagcgttccaaattttcgcgcatccatatccgtgagaagatagcttgtgaatattgcttgttcgtccttgttcaggacacgcatttctttccgtgaatccttgggatacacaatatcgatatgcggcatagacggaagttgacgggaaacatacttcagaattgaacgcagcaaggtgagaatgtcccgtactgttttcggagataatccgttttcagacaacaactcatacgagaactgctcgatcaggacggaggataacgactggacatagtagttacccagtttgggttttatgtgcttgtccaacatggaaaggtatttgacgtatgtggattctttgactttgctccggttgatcttcagccactcatcgcagtagctggaaaagcatctgcgggtacctccgcctgtgtgcggaaggttctgtaccaaacgagccttcgcctcggttacctttgctttcgcctctcggtaagtcttcccatagcagtacccgtatgcggtttttccctccgttgtgcatccctttacataacgggcttcccaacggccatctttccttttataaatgttttctccttttctaggcataatgatgttcctccttcagattttgaatatggttattttagcgctgatctgtgaaaaaacctccatcagacggaagttctgacggcgaatgattcaacaaaaacttcagactgccccagcgacacgctatctcgaccttgagccctcgaaaaatccgtgtcgaatccagcagaaaaaggaaaaaagcaagctctttctgttgatttttggggccgcatatggtataatcacagcgaatagagttgggaactctgcgaaagaatcggatgggccgattaggcagagccaattcccgttccgaaaccgtgtagatgcaaggatcaggcgcatacatgcctgagtttgcaaatttttttaagataagaatagcgtttgctatatgaaagtttcaagggaggagaccattggtggaaaaagtgagggatgttgcgtcagcactgattgacagtaccgttcgggtcattgcccgcgacggactggataaagcaagtgttcgtacaatcagctcagattgtcaggtcccaaatccttatatctaccagtttttcaaagataaggatgaccttctgatctccacttttacgcgcgaggataccaaattagcggacgagttttcacgggttttttcgtctgtccacagtctgattccggacacggaaaccagatgccgagtcatctggtttcgcctttggaaatacatgatggatcatcaggaatccattcagttctatgtccggtactattattccacgtattatgaacagtgttcccagacggagcatcaggaacgttttcggccgttggccgatgccattcatggctgctttgatgggaccgcaaatgttcaggcgcttcttcagcatattctggacaacatgatgaatctggcaatgagagtatatagcggtgaacttacagatagtgatgaggcccgttcacattattttacgctttctcttgcctccgtggctccctatctcaggatgaaggatcgacgagatgcgatatgaaggagggtgtgacctttgaccgataaagaattgcgaaaactgaaccgcagtgctcttctggaaatgttggtcgaacagagccgagagaatgatcggctacgggctcaggttgatgaactgcagcgattgttatctgaccgccagctaaagatcaatcaggccggatctattgcagaagcatccttgcagcttaatcaggtgtttgaagctgcccagcaagcggctgaacagtatctggaaaatatccggtcactcagcggcagacaggagcaagtatgccaacagattaaggcaataccgcacagaaaagtaggcgcgatactgccagaagtgatataataagaccatggataaacagatgacaatgactgcgctgagtgatgagctggcgcaggtacggacaaagaagaaagaatttctagcccagatcgaacggatcgtcccatggaaggaatggcttacgctgatccagccgtgctattacaaaggagagcgcggcaataaaccctatccactggagaccatgctgcggttgtatctgctgcaaaatctgtatgacctgagtgatgaagcaacagcggcggaggcaatcgacagccgggcattttcagagttctgcggcgttgattccagcaatcaggtgccgaacggagataccattggccgctttcggaacctgctggtgaagaatggactgcaggagaaactgtttgcacaagttgttaccgcgctcactgaacagggccttatcctgaaaaagggaacgatcgtagattccaccattatttccgcgccgtcttccaccaagaacaaggagaaaaagcgggatccggatgcacatcaggtcaagaagggcaacacatggcactttggctataaagcccatgttggggtggataaggacagcggactggtacacacagtggaggcgacaccagccaatgtccatgatgtgacgcagacttcatccctgctgaccggtgaggaagatgtcgtttacggcgacagtggctatcttggagccgggaaccgtgaggacgcgatcgttcggaacaaatccggacgcaagatcaaatacaaaattaaccgacgtccatctcaattaaaaaagctgagcaagagcggccagtatgccgcaaagaaagcagaacacgcaaagtcttctgttcgggcaaaagtagagcacgtattcggtgtcgtcaagaaacagctgcaatttcgaaaaacgcgataccgagggctcgaaaagcagcgagccaaattcaatatcatgttcgcattggcgaatctgcttctggctgacaggccctgcctggcggcttgaagttgtgcgctctcgcgaagaaatgcgccgggaagcctatggtttcctgcctgatgggtgattcgacagcgcttgcctcagcaattgtgcggtgctgccataggacgatagtctttcgagaaaggaaaacgatatgtcgttgagaaaaaagctgacattgtctatgctcataattgcggtgatccccgcggtggtactgggaggcttttattatcagtatttcagcggggtccttttgagcaacgtgcagcagcaggagctgcagaataacagccagattatttacagcgttgataactttttcaattcaatcttcaagatttccgattccctgctaatgaatgaagagctcatagacattctgcagaaaagctatgaggaacagagttcacctctcgaaggataccgcgacaaggcacaggtggacaagctgctttacaaggacggctattacctggatggcagaatagagactatcgccatatttccgaggaacaacagcatgttttactactgcacagagggaaacgtcaatccgtcctatgatatccatgcggaagagtggtacgaaaagattgccagtaaagagggggcgaaagtattggtgggagtgcaccaaaaccgtctggtgtacgcattctccgacgcagccagcccctattgcgtaactgtcggaagatcaatttactccccatatgattcccaactgcttggcactatgctaatcaacattaacgtacacgatctccagacctgctggccggctttcaaggaagattcgcaggagcggttttacctgctggatgacgaaaacaacgttgtgttcagcaatctgacggaggagattggcggtaaattctttcagggcggcctggaagacggcatttcttcctgccgaatcgacgggaaattgtacgatacgatcgtctcgggctccaaaagcctgggatggaaaagcgtcaaaatgattccacgcagccagttggatcaagagatcgccgttgttccttatatgacgctcctcctcatgctgatccttacggttctggcagttctggtttcaatctttatttccaaaatctttacacgtccgcttcaggagctttatgtgaagctccagcgctttgaagaggaaaaaagcgggattccgctccctgaaaatcaggtggagatcaaaggcctttcccgcagctaccagcacatgatcaacgagatcaacgccctcaccatcaaaaactacgagacgcagatccaattgcgcagggcagaactcatggcgctccaatcccagatcaatccccattttatctacaacacgctcaattccatcaagtggatggcggatgtgcaaggatccaagcgtatggtaacggcgttggattccctgatcaagctcatgcagttttcctccaaaaacagccgggaggtcatccggattcaggacgagatcgatctgatccgggactacatcaacctgatcaacctcaaatatttcgacaggatctttgttgatgtccatgtggagccgggcttggaaaactgcgaaacgctgaaattccttctgcaaccgatcgtagagaattccatctaccacggtttcagcagtatggtccggcaatgcacggtgcagatcaacattacccgaaaagaagaccgtattctgtatgaggtgatcgacaatggcaaagggatgagcaaggagaagatccgacaggctctggaggaagatcatcccctcaactcccattcgtttaacaagatcggtctttataatgtgaataagagaatccagtatatttttggagaggagtacggtattcaaatcgacagcgaacccggcaagtacacgagggtgattgtggaaattccagcccgtatctataaggaggagatggcaaatgcgtaacatcgggatcgcgatcattgatgacgagagcctggtccggctcggaatcaaatcttctgtggcgtgggaaaagtatggctatgagattgtaggagaagcggacaacgggcagaccggcctggagatgatcagggaaaaacacccggatatcgtcctgctcgacgtctgtatgccggtgatgaacgggatcgaagttctgaaatccctgcaaaagctgaagattcagtgcaaggttattatcttgagctgccacgatgatttctgttttgtaaaagaggcaatgaagaacggtgcgttcgattacctgagaaaaaatgagatcaacagcgcgaacatcctgacggttctggaggaggtacggcactcactgtgcaaaaagcaggacgaggggcagggaggctgggacagttacgcgcgtcatgtctgcctgcaccgtctgatcaccggcagcagcgaacctgctgaacggcagttgcctgtcagtcaattgcacatccgggaaggaaacctctgctgcattgtgtttgcagtgcagaattaccagaaagtacaggcccgttacggagagggacgccccttcccactggaacaaagcgttatcaacctcacagtggaagtgctgcaccagtggacgcaggaactggaagtttttcttctgcaggaaaaccggtatgttatcctgctgagcagtcagaacagtgtcagcagcacccagtgggaggagaaagtctgcagcctggtccacgaactccacaccgtgttccagaattatctgaatgctgacacctgctacggtgtcagcagcgccgtctcgaaattctctgcattgccggaggcgttcgagcacgcgcgctactctctgcatcttcactattttcagccggacaggttccttatcaaggagatgcgcaagccggatcggacgatgagccgcccggaagtcaaggaatgccttggcgatatcaatatctgtgtgtcgcagaagcaatacacgcaaatcttttcccgattttatgctttcatccagtggctgcagcagcaccacagagagaacctggacgttatgggggtgcagaactttttctccaatatggtgcgcttccttctcctgcaggagggaaaggcgccggaagaaacggtggaaaagcttcaggcctgcgaaaccgtggaggaagcgcagcgtttccttgaggacttccaaaaggggttgaagacaggagagccggctcttgaccagaaaaactacctgattcgcgaggcggcggattatatccggcagaatttgagccgcggcgacatctcgctcgatgagatcgccgaccacctgatgatcagtaagtcttatctctgccgcctgttccaaaaaaagctcggagtttccgtgcagcactatatctacagaatccggattgaacaggcgaaggagtacctgaacgacttccggctgaaaatctacgaggtggcagagcttaccggcttcaacagctccacccattttaatatcgtctttaaaaagattatgcggtgcactccggcagagtacaggaacggcctgaagcagtgagggaaaggtcaatatgaataaataaagttcaagatcctccgcgggtttaagctttgtgtactaaaattgttcaatatcctgatattttcttcaacagcgtttatggaaaatagtgaacagattctctatgatataagtaacctaattcgggaaaacagacaaaatggaggaatgcagaaatgaaaaaatggaaggttgccttaattggctgcggatcgatcgcggacaatacgtatcttccccggatcggcgagattccggaggcggatctggttgcagtctgcgatatcatcccggagagagcaaagaactatgcagaaaaatttcatgtgccggcctggtacaccagcatcgatgaactgctggagaagtgtgacttcgagatcctgatgaacacgacatcgatcccagcgcaccacgagatcaacatgaaggcgctgcgggccggaaagcatctttactcacagaagcccgtcggcctgacggtggaggaggtgaccgagcagatcgaggctgccaaggcagccggtgtgaaatacactgcttcaccgatccacatgctgcgtgacgacatccgctttgccaaaaagctgattgccgacggctgcatcggggagattatgaaggtgcacaccaacgtttgccacggcggcccggaatatttccagtaccgcacggcggaccccacctggttccaccggcccggcagcggcgccctgtacgacatgggcgtccacggccttaccatgaccacgggcatccttggtcccgcgaaggctgtgggctgcatggccaaaatctccgagcctgtccgcacggtaagaaccggtacctttgacggcatgcagatccaggctgaccagctgtacgataactacatcattacgctcgattacggcgagagaaccatggcggtggtggagtctggtttctgccagaaggacagccgcgcacctcagatggagattttcggtacaaagggaacgatcactttcgtcaacaacggtaacatgaacccgctcgattcgctggaagtttaccttgatgcgccggagcgcggtattcgcggctggctgaagcctatggagtgggatgttccggcttctgagatgaactttttccaatgcaaggtggttcaggatctgatccatgccattgaggaggaccgtcccgtcggtttgcccccggagcacgccagacacgtggtggacatcatgtgcaccattccggaagcgatcaagacaaagagcattgtcccgctgcacaccactttctgagcagaggggaactgatcacagatgaggtgaatgttatgaagaaatatcgcattggtctggtgggcttcgctcacatgcacgttttggatcagatcaagccgtttctgtccatgccggagcgcgtggaatggatcggtgcctcggatatcaagccgatggtagagtctgaatattttgaaagctccagccgctccatgaacctgaagctctgtcaggagcagtgtgggttcacccgcgtgtttgaggattaccgtgatcttctcgatctcaaacccgaccttgtccttgtgaactgcgagaacgcgtttcacggaatcattatccccgagatcctcatgcgcgggatccacgtggtggtggaaaagccgttggcctattccactgaacacgccatggctattgcccgcgcttcccggatcggtaaggcggactgcatgatcaattggccgaccacatggcaggccagcgtccgcctgggccagaagcttgtcagcgaaggtgttgtgggaaaggtgtaccgtttccagttccgcaaccctgactccctgggtccgttctcttacggccaggtcatgacggatcggcagctgggcaaggaatggtggcatcaggaagcggcgggaggcggcagcttgctggactactgctgctacggcaccatcctttccaactggtacctgggcgaaaagcctcagggcgtgtatggcttgaaggcgaactttaaccaccggtttggcgacgcggaggactacgcctccctgatggttcggtaccccgaggcggtttccattctggagggaacctggaacaccataagcagcggctatccctccgggcccattgtctggggcgaaaagggcgccctgattgtggaaaacggcggcgatcacggcattcatgccaacgtttgtgtttacctcgatcgttattccacaacgcccagcaaggtgtattgctccgacgactacccgctgcctgagggaagatccaacctggctcaggaggtcttccatcacctggagaccggagaaccggtacactacaccatggatctcaataacaatctttggtctgccgctatgttggatgcgggaattcgctccagccggtcgttgaaaatggaagaagtaaaaaccgcttgttggacgattgggtaatataagaggaggatgctacatgaaacttgcaaacgtttcctggggttggacgccgatcccggaggatatgccgcatggggactctctgatccgaatcgcggatcagatccgtgaactcggcttcgagggcgtggactatctgggaaccccggaagcactggatgaattcttcacggaggaagcctgccgggcgctgggggatcactcccgctccatcggccttgaacccaacgtgttcgtcttccaggacgcttcgtggaacgacgcctgcagcgaaaaaagggaggacagcgtcaggcacttcgagaaggccgcacaggccgcaaagtggatcggatgccggattgtctccacgctggtgccgatgccctgcggcgcaaccccctggaagttcaaccccgccgcaccggcgatcaagcagggataccatatgcccgccgactactgctaccagaaggactgggataccctgatggacagttaccgcaagtgtctggccattgcaaagcggtacgggctgcgcatgtccgtggagtgcttcccctattccatgatctccacaccgcacgccatgctgcagctgctcaaggacgtcgatgacccggatttcggcattcagctggacacgaaccacctgatcatgcagcacatcgatccggaatggacgatctacatgctgggaggcaaacgtattttcaatgttcactgcaaagacagcgatgccgtctccagaaacaacatccccgccggctgcggcatcaccgactatcccgctgtgattcaggcgctgaagaatgtcgggtatgacgggaacctttctgtcgagctggagttcacagacaacccccgccgctacaacaagcaggcgatggatcatctcaagctttgccttgcgggtgaatactgagctgccgtctggaggcacacagggggtatccccctcgatccgggcgcggcgccggataaaaatcatgtttttatggaagaggagtaggagtaatgaagcagtataaggttgccatcatcggcaacggtatgatttgcaacgcggcacatattcccgcctacaaagccatgggtgacaaggtgaagattgtcgcagtggcagatatccgcgaggaagccgccaaagaaaccgccgagcgtcacgggatccccaagtactatgtggatccgtataaaatgctggaggaggagaaacccgacatcatctccgtgtgcacaccgaacgcataccacaaggagtatacccttgccggtttccgtgcgggctgccatgtagtctgcgaaaagcctgtggctgtaacctgcgcggatgcggaggagatgttcaacgcggcggagaaggcggggaaacatctgtttgtcatccagtctctgcgtttcacaggtaacttcaaagcggctgccggactggcaaaaagcggttgcctgggagacatttactacgcggatctgaacctggtccggcgccgcggcgttccgagatggggcatgttccacatggcgaaagaaaatgtgggcggcgccttctgcgacctgggcgttcatatgtgcgactacctgatgtcaatttccggtaacccgaagatggtttccgtcagtggaagtgctgtgaccaggatcgtcaacaaggagaagaatattgagttctccaatgcggagagcggagctcccaccggtctgttcactcccagaaagttcgacatgaaagagtttgatgttgaggaatttgccaacggctacattcgtctggaaaatggcatgacagtcactttcaagatctcctgggcgctgaatctgcccaacagcaacactgtcagcatctgcggagacaagggcggtctgaccattggggacgatggactcaagctgctcacgacgcagggcaattaccaggccgacgttttgccgagagttttccccgacccatatacggaactctcagatttcaccggccacatccacgagatgaactacatcctgaaggtcctcaacggggaaatgaccatggaggaataccccatccagaaggacgaggttatgaatgtggttgcgatcatcgaagcgttttacaaatctgcacagctgggcagggaagtcactgctcaggaactggaccggtaagcggaagctgcaagggatatttgcacagagcacggcgtgacggaagaacttgccgtttcgccttgggacgaaacgcaacagggggactctgcccgggcgggagagccccctgttctggtgtgcgagacgacaacggaaggggaggaatccatgaaaggaatcataacggagatcgagaggtttgcgctgaaagacggaccggggatccgcaccacagtgtttttcaaggggtgcaacatggcgtgcaaatggtgccataacccggaaacgctgtcggttcggccacagctgatgatttatccggacaaatgcattggctgcggcgcctgtgtggaggcctgcagggcgggagccagaaccctcggcaaaaacggtgccctgcagtacgatcgcaccgcctgcaagcactgcggagcctgcgccgcgaactgcttctccggtgctctcgtcatgtccggaaaggagatgaccgttgaggaagtgatggaggagatcctgcaggacagggcttactaccggaattccggcggcggcgtaacactctccggcggcgaggtttccacgcagccagaatttgccctggaattgctgcaggccctgaaaaaggagggaatttccacggcgatcgagacgaacctgcatgcgccatggagcgtctacgaaagaatgctgcccttcctcgatctggtgatgttcgacatcaagattttcgatgaggaagcgcacagacgctggaccggcgtgagcaatcgtcaaatcctggagaacgcaaagaaggtggcggcttccggcaagccttatctggtgcgtaccccggtgatccccggagtgaacgacacggaggaggagatcggcagcattgccaactacgtgggaaccctgggaggcgctcaatattatgagcttctgctgttcaatcccctgggagagagcaagtatgacgccctgcagatggacaatacatttgccgggacccgccccactggagaggaaggcgcagcacgcctgaaatgggtggccgctcaaacgcccggactttccgtgagggtaggctgacgaagaaagggagaggttgtatggtcaacagaatcaatatattccagccggatgctcccatgagctacgatgacaggatcaaaattttaaaggaaagaaagcttgaggaaaccagggtgaagtccaccatgaaggtgtatcaggacggggatgactatggaagcatcccggctccggagacgtaccagttccattgcattccgaaccatgagaacggttcctggtacgggtatgacgggtggagcaagaatttttacaagctgatgactgagcacccggtctacattgatccggtggacgcgttcacctgccgctggatgttcagtatgatctggtttgacgagaaatccccggacaaggggctgaactggaacccgaattttccctacgatgatctcaagccggaacaggaactgtatggcattatctccgggatcggctcggacgcgcacttcggcggcgactaccggatcgggttgagccttggctggggcgggatcttggaaaagctggctttctaccgcaaaaagcaccccgaacacgcagagttttacgacgcggaggaacttgtggtgcacggtgtgcagaactggatctcgcacgcgattgaggagagcgagcgtctggcccgtgtggagcgccatccggtcctgcgggaaaacctgcttcaaatggcgcaggtaaatcgcaacatcctcaacggtgcgcccaaaaccatgcgggaagcctgtcagtgggtttgctggttcaacatggccagccgcacctacaaccgcgacggagcgggtttccagctcgatgacgtgctcaaacagtactacgatgccgacatgaaagaggggaggatcaccagggacgaggcgatcttctacatcgcttgtctgttgctcaacgatccgcactattaccagatcggagggacaaacgaaaacggcgatcccctgctcagcgagttcagctatatggtgctcgagggagcggataagctggattcggcttgcaacatcacggtaagagtggacgaaaacatcgacagaaagttcctgaacaaagcggtggactacctgttcaagaacaagaacggctggccgcgcttttccggtgacgaggccctgaacagaggcttcatgcgtttgggctatcccgaatcgcttgcccggcagaggatcgcggtgggctgccactggatgagcttgcccggcatggagtacagcttgaatgactgcatcaaaatcaacagcgctaaggtgttcgaggttgccatggatgagatgatgagccataagggcccatactccacacaactgctgtgggatctgtaccagagacatatggcccgggctgtagaggtaactgccgagggtatcgcgttccacctgcggtaccaacagtacaacgagccggagctgatgttgaacctgatcagtcatggtcctatcgaaaagggtctggatatgacgtgcggcggcgccatgtactacaacctctgcatggacggctcggctattgccacggtggcggactcttttggcgcactgcagcagcgggtggaggaggagaagcggatcgactgggagacgctttaccatcatctgaaaacagatttccaggataagggcggtgagcttgtacgccagatgctctcccgcagtgcccgctacggcggcggaaacaccatcagcgaccagtgggcggtgaaaatttcggagtcatactccaaccaggtgcgctccgtcagccagaagtatccgggctaccagtttatccccggctggttcagctggtcgaatacgattgtgctcggcaagcaggtaggtgccacccccaacggccgccacgccttcgagccgatcaaccatggggccaacccgcaccccggcttccgcaaggacggcgccctcaccgcaatgagcaattccatctgcgcggtgcagccgggctatgggaataccgcgccggtacagctggagcttgaccctggtatggggcgcggtgaggaggctgtgcaaaagatcgccgactatatcatgacgctgttcgagcagggggccaccctgctgaacatcaatattgtgaacggtcagcagattctcgaagccgacaaggaccccagcaagtaccccaacctggtggtacgcgtcacgggctttacggcgtacttctgctctctgactccggagttcagaaaactggtggtggatcgtattctcatacagggatgaacaaatgatttggcttggcttctgttttttctacgtcacggttttattgcgaaaataaatcctaaatggcaggctgagcaggaagcataaagaaatatcagaaatcatttggtcagatacgtaaactttctgcagggaggcatcgtgcaagcggtgcctccctgttttgatatactttagcgaaacgagagcccccgactaggccggggagagtaaaagaaattatggcaacaccgcacaaagaaaaaatatgatataataatactatggataagcagatgagtctgtcgggcctgagcgatgaattgagccaggtgcggacaaagaagaaagaatttctgagtcagatagagcgcatcgtgccgtggggagagtggatcgaactgatccggccgcactattacaaaggagagcgcggcaataagccctacgatctagaacggatgctgcggatttatctggttcaaaacctgtatgatctgtcggacaaggcaacggtagcggaagtgatcgacagccgtgcattctcggaattctgcggagtggaatcgagcaatcaggtgccggacggagatacactgggtcggttccggaatttgctgctccgcagcgggctgcaggagaagttgtttgcgcaggtggtatatctgctgcaggaaagaggcctgctgctgaagaagggaaccatagtggactctaccctgatcgcagcgccgtcctcgacaaagaacagggaaaagaaacgagacccggaagcgcactcggtgaaaaaggggaacagctggcacttcggctataaagctcacatcggcgtggataaagacagcgggttggttcacacagtaaaggtcaccagcgccaacatccatgatgtgacgatggtgccggagctcttaaccggcgatgaggacagcgtatatggcgacagcggctgcctgggcgctgaaaagcgggaagacgccgttcttttcaatgtcaatggccagggcaaaaggatccgttacaaaatcaacagacggccctcgcagagtaaacacgcagacaatcgttcccgcgggcagatcaaacgccgcgaaaaggagaaatcctccgtacgggccaaggtagagcatgtctttggggtagtaaagggccagcttcgataccggaaaactaggtaccgaggtctgcgaaaacagattgccaaattgaatatcctgttcgcgctggcgaatctgattctggctgacaggcgatcctgcctgacggcttaaatcagtgtggctgcagcgctgatggaatggcgtatatatgccctgccgggtggaatcttcccacagggcctttccttttgcgtgttctgcggtgttgccttaaaagtttcagtagctgtttccgtcgaactgtggtatatgtttgtgttgcaaggaggcgagcgcatgaaatacaagctgctgaaaaacctatatgactgtttttataccccacccgaactctcggcgcagaagcaggaaattgaggagtgccaccgagcacttagcgaggcgttgggaaagccggagcgtcggctggtgccccggatcatcgacgcaaaagaccgtattgcggaggacacctccatcgacagctttatcaccggatttgaactggcgtggaaactctccatggaattgaactattacgaaaacgagcgctcagtctcctgccgaacggcaatggagttgagggcgcgtttcacatctaaggaggaagagaaatgaagaaactcatcatagtggcaatgattgccgcatgtgtcgccctgtgcgccgctgtgtggccacatggcaacgcggtcgaggaaacacccgtcccagccgcagaaaccactgtgagcgccaaggaagcgaccgttggagaaattgaggaacccgcagcactggcagagaaggaaaaaggggcggttccgcagcaagaagcatcccaagaggaacgtcctgaaccagagacagagcctattgaaatgcccgcagattctgaactccagccttccgcagagcagtcacccactaaaaattccgcaccagagccaactccatcccaaccgcctaaagaactgcagcccggtgagaaagtctatgtggcgggtttcggctgggtggagtacgaggggccaaactactgtgaagatggtacggatatttacgaaaacggcaacaaaattgggatcacggggtgaaatgtgtagttgcccattgcattcgcttcccattcgtgttatcatgataacgctaaattgttgcactgtcctgaactttgatcgttcgtagcatgagagtacgaatcatattgaacggcagagacatagacaatcttgcagacaaatgagtaaatcctcgaaactattgattccaatcaaattctcattatggaattgagaaagcagtttgctggttgactgtcgttgtccccccccctgttgtttcgatgctttgcaccacaaaatcgaaccgaagaaagtgttctttcgtcgggtttgttttgttgcgtgcaaagcggtcttccggatgatcgcagtccacgcacgaagcaaagtgcgtgggcttttttcggctcagaaaggaggccaattatgggaaaggtgtcaggaaaaacacataccaaagaacagctggatcactgggcaaatctgcataatcccaataacaagacatatcgaactgacgcagacaatcgtgccaatcagatgaatccaaaccacagaacgcaccagaaaactcacaatgcaaaccgcagaaacaaagcacattggatgcccctgtgggcaccggactatccggaatacgatgattaaaaattggaggttacggtatgtcaaagcactttttcgactacgatgacgacgacttcgccatgagcatttctgacagtatagcgagggactccgatgggaatctcatgatgcgcatgggcgattacatggcgatggatatgaacaccggcgatattcacatgatttcatcatgggccgatgacgatgactaaaccttaggcagtagctcagcggctgcaccgccatagacaaggaaaacactttcaaaatccagacagaaaaatagcgggacaggccgtaaggcttgtcccgctgtctgtatcctatggcagatattcttccgtgattcgataccggctgatgccgaaggcgttgctccgctccatgatctctaccgggatcttgggcagatacttcttgctgaagctggtgtccccgaaataggcgtcaaagtttgctactggcaggaccacccactcgcaatcatcctgtcggttggcgaggtaatagcggatcagcgtccaggcacccttggtttggggcgcaaaaatcgggatctgatactgcaacaccttgcttcgccacgcggcggcaaattttgactgaatgacctccgcatacttgagcgaggtgctgcgcacattttccgggtgcgtcagcatgaagtccgcagtgcggaggacatgacggagaaaccagccgatcccgtccgcgtccaccagctccgggaactccgtgtgcagctccgaaaagtccgtctggagctgccattccttgcccggcgcacgcttcccgtcctccggcacactgcaccatgcgcagagcgcgcggcgggcgtagtcgatccgatcgtgggaatcacccgaaatgactgtcccgtttttatcgtggaacaaatatccgcgggccagaatggtcaaaatccgagccatcccctcaaactccaggatcgtggcaaaggtgaatcggcccagccatgtcgtatcgctcttcttgctggcggtataggaaaccgttccggtatatgcgcagaattcctcccattcgttaatcatcccgcacctccagaacatttttctcgatgtactccggcagcagatcccacagcaggtcacgcctgccgagagccaccacatagcgcacagccaaagtcggtctcacgatagcggtcagcagttcccggcacttggccgtcaccgcatcacggtagctccgggaaggggacttgtccgcaaaggcgctcatcatggcagtgaaagccttcgagtcgttttcacgaaacagccgctttttctccctgccggtgttctcgtccgccatatcacagacaatgtctcccaggatgcggtagccgccgaagcggaaatcggtcagtagatcgtatatatcttcaaactccggcagccattcccgcaggaaacgttcccgtgcatcctcgtccatgaagtgccatacctgttcccgcatggcgcgtcgcagagcggacaccctttccggcggcagactgccgaacagggcgtacagctcgtcgggatcgtatgtatcctcctgtcctctggcatacaggatgcgctccacatcgctcttccgctttttctccttcaacggaacacggcaggcccggatgcgggagagacaggcatcgtaatcttgcagcagcgcatccaccgttgccagcttatcgggggtcagctgccccttccagtccggctgccgggcgaaggaaaacagctcctcatccttggcaggccttgccttgatgcgcggcgtgttctttttcagctgctgtgccaaatacggcagacgctccacattggagtccaccttgttccaatccacctttttgaaaaacgctttcaccttggtcgcatgggtaggctcataccaggcacgccgggtctccatctcctctaccagcgttttatatttgagaaagtcgctgcgcttgacggtcttatgggtcagatactcatccagatcagggcgaatgccgctcttggccgagtcgatctccagcccggtgagaatggccaatgtctccgtctcctcccagcagcgctcccgttcctcggcgtcggagttttcgttgtaggcaatgatgctgcgatccaatgcggcgttgcagatttggccgacgcgggaggagaaggtactgcggaccgtttcgaagcgggcctcccagtcgtcggcgctgcggatctgaggctggaccgtggggatcatcagcagtggcaggttgtgcgaccgggaaaatacgctccgcggccgcggaggatcgtgatagatgtttcgtttcacgcattcgttcaaaatggggtcgctgatcgtcttgatcatgtcgccgtcgtagtcggcaccgcctaaacgctctgcggcgagtgaagtgtagccaaccataacaacatccgtcagatggccgaggtattgatcgtgtaaatttttcctgtcttcaagaggataaagctgcatttcttcattccgggcaatgtgcggattgcgcagcagcgtgcagacatgactggattggtaagccgcgctcggagcaaagaaattctgatggttcaactccagcccccagcgaaaattgataaaggtgttcgcttttttacttgttccggttttcgtaacaggtaggcaattcaaaaaatccagcagatccccagaaagataccggttgtctcccgccacaatcagccgtccgacggcgtactgctctgcaattttgtccgcttcggcctctaatcgcttggcgtagattggttcgttgatgaagtgtggattctttttcagcacagcggcaaggatctggtctttgccctgatgccgttcccaccagctgacccgttcaaacttctccagaaaataattccgccgaaacgactcatcggcgcaaaagttgtaatacgccagctcggtctgcttggtgagccaatttcgctcgtctgtctccgggctgtggtcccagccgtccggcagatcggcagggcggaactcgtcaccctgaatggaaacggtggtcagaaactgatagttcagctcggtggtctgttccggtttctccttgctcacattggtaatgtacagcgcatggcggtacttgcggaacatcgcccaatagtcctcccagctcatgccgctctcgttcagccagccgcagcccttgaacatacttttggtgaggatgatgtcaatcttctgaatcggatgctgcacgccccacagatcggtgatggtgtccgcgccgctgcggtcaagataatccttgaagtccacctcgtgcagcatgcctttcacatatggcatacgaatttgaaatgaggtgtggactttccttccgcacagcttctcatcaacaaggcgggcatactgcttggagatcagcccctcgccgtcgaagcaggtaacctcgacggtggccatcgtctccacccggtgatatttgcgggtgctgttctgcgccccgtcatcctccaccgtaatcatctctgtgggcgggggtgttcgtaccggattgtcaacgaccactacccggtgggggcggtcaatgtcgatgccgtcaatgcggataccgctggacagcatcaggccgttgtaggcgtagagtttgctgagctggcagtcaccgatggtcatatccatcatgatgcggcggcgcaccgcatcataaaaatcctctcggatgaaggacagccgcgcctgccggctcatgctgcccgaacgctcaaaggcgaggtagcgatgcggcccggagccaaaatcaaggctcacgccctcgggacggaacagggccttcgctttttcctgccggatccggtatttctttctggcaccgctccggtcgaagatgccggagaagtctatatagaaaatgatgtccgagaggtcagtcaccagttgcccaccgggtcttccggtgaaggtatcgccgtgcagcacgcacatgatctgatagaacagtgcgttatcgtcctgctcgtgaggtgcggaaagtgatttgcatttctctgtctcggcggcgctgagatggaaggtatatgtcccgtcctgctgcctgccatagctgatcacagctctggcggacagctcgtagatcctgtattttaccagcggcatcggctcacctcctcatgcttctattctatagccatgagcaaaacttcaaaagagcagtaatatcaatggttcccggccatggctgaaaccgaaatcactcatatggtatagaaagcggagcccctttttggtaaaattgacttgagagaaaaccaaccagaaaggggctggccgctatctaccgacaggaaatcattcaggatgtgacattgtttacatcccaaagtgccgctgcgttctacgacagtcttttcagcagtctggacttcacgctgcccggagcggcaaccgggcggcggggctttccaaaggaagccatggtctgtgcgtttatcgttatgaaatgcgagggcttctcacaaatcacagatttggcggattatctggacaacaaccgcatcatcgcccattactgcggtttcaatatcatgaagccgttgccgtcctactggacgtatgaccgtttcctcaaaaaaatggataacgctgcattgaaagaaatcatggcggcacaggtgaagaaactctatgagatggggatcgtggacgcctcatttattggcctggattccacacctgtcatggcaaacacgaagcagaacaatccaaaatcctttgcaaagaacaagttctccaaggaaaaccacccgaaaagcgatccggactgcgccctcggcgtccattctgcctccaaccagcacaatgagcgccggtacgagttctactgggaatacaaaagtcatgtgctggtggactgcatctccggcctgccgatctacgagctgaccacaccaggcaatgtcgccgattcctccgtcgccgctgagatcctcgccgaagctgacagggtgatctccttaaaggaatgcaccttccttgccgacaagggctacgatgtgaaaagcatctacaataccgtaaaaacggtctatgagggcgaggcttttattcccctcaatccacgcggcacgaaagcctctgaagcgatttctgtcggtaatccaatctgcgaggccgggctggctatgcacaaggatggcaaaaccaccgacaatgggcgtacccgccagaaatactgctgcccgttccgccagtccaagaccggtgtttgcccttgtaaccacaagaattggaacaacggcaagaagaaccggggctgcacgaaatataagaccattcccgatgactacagactttccattgaccgtagctgcctctgtttcaagaggatatacgccttgcgtacagagtgcgagcgctacaattcccgcttcaaatccacaggtcaggaacgcctgtgggtgcgcaacggcgccagcgcggcaaacctcaatacactggcccacatctccgctttagcggtcgcgctggccgctgttctgcacggctctcactcctaccgttccgccaaacagcttcggcgttccgcctgatctgtcttttccataccttttgcaggcgcggggtttaccgcgctatggtttttgcgcccttgagatacccctaaactcttttgcttcccatttgcctgtttgtgggctgctctttccaactgttttgctcatctcttttctattctatcatgaggttttaaatttgcaatgtggatactgctcccactttttcagtgggagctttttgcttgcagctctcaacaaaaaattataaaggaggaatccaatgcaagaatccacattcaccaactacgaccagctgccgctgttcctcaatgcgaacacggtggcgcaggtgctgggcgtgtccatctccagcgcctatgagctcatgcacgagacgggcttccccgcgctgcggataggcagccgcatcgtggtacccaaagaagagttccgccggtgggtagatgcgcagacagggggtgatacctgatgttccagcgctggcccaagcaggacccgaacaaacactactatctcgtccccaacgaagtctttaatctcggactcagctctcacgagatcgccgtctacaattaccttctgcgctgcgaggatcgcagaacctaccaatgtcatcccagctaccgcaccatcggaaaggcggtgcagctgagcgaaaacaccgtgcggaagtatgtggccggtctggaggagaaggggcttattcacaccgagcccagtaccatcaccacaaaggacggccgcgtgtgcaacggaagtctcatctacaccatccgccccattcaggaagcactgaagctgaactatcagcggcagttcctgcgggcggagcgtgacatagagcgggcaaaggcagagaaacggctggccgaattgaatcggcagaacaaaaaggaggaaagcgcatgatgcagcagcttgcaaactttattgtagaccatgacccgatgatggttctccagcgcacgcacgacacagtacgctacatccggtgggcgtggaacaaggatcatgccgacctcattgatgaagacggacttcgcctgtttctctgcgatgaacatcgcggcgagctgaccgaggagcagaaggttttcgcccgccgatgccgcgacgagatgcggagcgtctatgaggaaatgtgcgtgcgcttactgcaacatgagatcatgctggagcgtggcatggtgccggacagcagcacctaccgcagcgtgttctgcacggaaggaggtgatgcgccatggatgcttgaccaagcgggatgaccgaaaatcggaccgatttgccgccgacgaaagaaaagcaggagaaaggaccggggtcgtaaacgcctcggtccgtcccacaaatgcccgcagtgcgggcattttcaagggtttgtgaccggggacagaggaacgctcctttcgggagtttgtaccctgtggaacgctccaagttccagcttcctcagtgttttcaagggtttccgccgacgctctaccggccccatgccccgattttgatccaatttacacctaatttgcacttcaaaacgcagaaaaagaattgagaaaagcaatagctatttccgcaaaagtgtggtagttgtttgtgttacaaaaagaaaacgaatccaaaggaagtgaaatacatggcaaaacgaagaccggccggtgacggcatggtgcgcaggcgagaggacggacgctgggagggtcgcatcgtcatcggccaccgggaaaacggcgagccgctgttccgtcatgtgtatgccaagacgcaaaaggctctgctggacaagctgcaccagaacatcgagtgctaccgcgatgtggagctgaccgaggacagctggatgacgctgggccagtggctggatcgatggctcacggagtacaaggcgggtacggtgcggcccggtaccctcgagggctaccaccgctacatcgaatactacatcaagccgcagctgggcgacaagcagatctccctcctctcccagcaggacatccagcggatgtaccgccgcctgaaaacggaggggcgcatccgcgagcaccccgagatggggcatcagctctccgactccatggtgcgccacattcactccaccctccacgccgcgctgaaggacgcggtgcaggcacacgtcatttccagaaatcccaccgaaggtacaacggcgcccaaacccaactacaagcccaagcgcatcctgaccggcgaggagctggatgctttccgcgcggtggtggagcaggacgaggtgtggtgggacttcttccagacggagctgatgaccggcctgcgccgcggcgagatctgcggtctgcaatggagcgacttcgacgaggagagcggcatgctgaaggtgtgccgcaccctccacggccagcggaagggcgagtacaccgtcggcgaaaccaaaaccgagacgggaacgcgcacgattgtcctgccgccgagcactgcggaacttctgcggaagcgaaaagaaacggcagtcagcgaatggatattcccgaatatctatgaacccgaaaaaccgatgcaccccgactatgcttaccaccgattaaaaacactgttaaaacaggcggagcttccgctgattcggttccacgatctgcgccacaccttcgccactcacgcgctggcgggcggcgtggatgcgaaaaccctgtcgggaatcctcgggcataccaacgccagctttacgctggacacctacacccatgtgaccaccgatatgcagagaaacgcttccactatcgtggggagctttatggatgagattatgcttgaaggagatgataccaatcgctaaaaaaagaaaaaatggcgaagggacacttcgcctgcgaaaagacgggcggtgggaaggccgtattgtgaccgattaccgtgaggacggtcggccgattaccaagaatgtaaccgcaaaaacgaaaacggaatgctgtgaaaagctggaaaagctgaaagagcggtacggtcgtcacacggacaaaatcaaatcagatatgccgttcggggattggatcgacttctggtatcagacctactgccgacacacactccgcattaccacaagaaccgactatgaaaaccgcatttacaatcatatcattcccgaaatcggaaaaattccgctgaacaagctgtcgcaatccgatctgcagcaattctacgcaaaggaaaagacagacggaagaaaactgcatgcaaaaacttacggaaagggactttcggaaagaacgataagggggatacatgccaactgccgcacagctttacagcgggcggtgcaggagggcttaattcgcaccaatcccgccgtcggctgtaagctgccgccgaaaaaagcgcgggagatgcaggtactgacgcaaaatgaaattatccggtttctgcatcaagcaaaggaagaaggctattatgaactctttctgctggagctcggcacggggatgcggcgcggtgagatattggcactcaaatggagtgacctgaacttcaaaacaggagagctgcatatcgaacggcaggtatatatcatcaaggcagaggtgattatatcggagccgaaaacaaaagcctcgatacgcaccgttattctgccgccgtcactcttgaaaacccttgtggcgtataaggaaacggtggattcggaatggatgtttccgtcaccgactgataacggcagaccgagaaatccgtcatcggttagaaaacggttacaactgatcttggaacgggcaggctgtaaaaaggtgcgctttcacgatttgcgtcacacatttgcaaccatggcgctggagcacggtatggatgtgaaaacgctctcggcaaccataggccatgtgtcatcagtaaccacgttggatatttacagccatatcaccgatactatgcaaaggcaggcggcggtgcatatagaccgcaaaatcggcggcacagacgcccaaatgccgacgatagcgcgggaggaaaggaaagatacctccccggtcgaattcacgccgtacaagcccaaaatacgcaagcctgggacgggttgtgtcacgatgattaacgaccacctgtatgagggacggtacacaccaaccaatgcctacggcaagcgggaaagtcataatatctacgcaaaaacaagagaagaatgtgaagaaaagctcgcggaaatgattgcagaggttaaggcgcaaatcaaggcggaaaaagaaaaaatgacagggtgaccgaaaaaatcaccctgtcaaaatttgagatgcagtagacaaagaaataggtgcagaaaacgataatttacattttactgttcgtgggttggatccaatattttttcgaattctaatatctctgaagatttaatcgcaactccaagattagtaggtatgttgacaatcggctttgggatatttggaacattagcgaaagataaaatgccttgggctgtatattgaggccctccaaacagtattcccaaaagataaattctgtttcccactgtaatgcctgatggagtagcataagaaccttgattcataataaacaccggagaaccacttgaaccaggaaaacacgccatatcaagtaaaatatgtttttgcccttgataatccttttttgggtgtgtagcagtaatgccacgtctaataacaggtttatgattatattgatctgagataccaattggatagccaatcataacaatatcttcgattgctgataattcatttattttagattctgttgggattaaatctgtttcaagtggaatatagaaaatttttatatcagttttagctaattcattaagtgctggtcctaatggtaagcagcacaaatcaatatttttgttaggatggggaatccacttattacctgcacctgaataattgaaagaaaaggattcagtatctaaaggtttcccgttttcatctgctttacaaaactcaaaaacagttcttacactgttgtttactacatgattatttgtaattaaaactggaatacaggttttctcttctggtttattacataaatttactataaaccctgtaccactcccaactgaaccatcagcatattggcagtttatcaaaacagtagaatacgtaagcatttctgaaatactcatattgctttcactcattggatttactcctaaaataaaaataagtagccgccccaaaaaaagctttttcgagacggcattggtcggagtggcgaggctcaaactcgcggcctccgcatcccaaatgcggcgcgctatcaactgcgctacaccccgatagttattaaattgtggtcgtgtaagtggtcaaatctgtggtcaaacacatttttgactgctttttttcattttccgaaccgcccgaaatacgcacggttgaagggttttcggcggctttcgctttcgtgcggtgcgaacaccgtctatgctcccaaaccaagcgcgctaccatctgcgctacacctcggtgttccgttttaaaagcgggcgtgtcccataaaacgtattataccccagagggggagaaaatgtcaagtatcggtgcgtgcaaaaacgcgttgacaaacccggcgcggtatggtacagtaaacgcgcagacacgcaattcgaccattcgcgcgcgtctgccgggtcaaccgaaaaataatgacggatgcgaaatcttccgcatgaatggcaaagctgccgaaccgcgcgttcggggcttatgctgctcgtgccggaagattttttgttttccggcgggcagacgaaaacataaggggtgtccaaaatgaacgaagaaaaatggaagctgtttttagaggtcgcgcgcacgctgaactgccgcggagcaacgccgcttttgtacggctcgctcgggctgtggcaccgcacaggcgaggcgattttcgccgatgacatcgacgtcctgcttccggaaacgtggctttccgagcagtggagcgcgtttcaaaccctgctgcaagcggaggattggcgcctgatcgacgcgcacgagcacacgtttgaaaaacgtggcgtgcactgctcctttgccgcgctagaggagctcgagaccttcgccggagttccgatttctgagatcgaaacgcgcgcggaaagcggcgcaaagtaccgtctgctctccgtaaaacagtacctcgccgtctacaaagcctccgcaaaagacggctaccgcgtgaacacccgcggcaaaaaagacgcggagaaaatcgcgctgctggaaaaattggtgtaaaaaaggaactctctgcatcatcgcggggagttcctttttaaaacacatgcgtgggaatcttcttgttactgaaaaaatagggcggtcatggtttaagcttcaccacaaccaccccgccgcgctgttctgcggtgcaaaagccgctttgcgctaagacctcgtttatcggcacaaagccgtttgaaatcggcgtgccgcacggaatgcggtacgtttttccgccgagcacaatgtgcagcgtgtcttcgagcagctcacacccgccgccgagcagggtgaggagcggcaaaaggcgcacgcagccgttttgcagcacaggttcgtcaaacagcatcgggacgccgccgatctcggccttgaacgggttgttcgcgaacagcaaaacggtcttagcttgcaggcggttttcgagggtctgcacattttgaaacagcgcggggctttgcgctacttcgtcccagcggtgcagttcgcgaaagggaagatcatctggcggcgtaaacgtgttcggcgtcgttttgcggtgcaggccgaatgtgaaatccacctggtgccatgcgccgttcggcgcccataccgcgttccacgcgtgcgggccccaatccgtaccggagtagccttcgccgcaaacgtaccgcgccaaaatgccaaggtgcggcaaaatcaccatggaaagcgcggcgattgcctgacacacgccctgccgcgtctgcaaaagccccacagcggcgtggtcgcgcgtagcaccggtctttttgtagacgaaaaagcgtttcagccagctttgataagccgcaatcacctgaaagaagtctgtgttttccggcagaccgcgctttatgctctccgcaatatccgccgcaatgcaccgcaggtcgtttacctctttgccggtgctcatgtaccgcgcgttgaccgtcacggtcagcgttcgctttgcaaagtcgtgcacgtagcgcgtgtttgttttcagcatttgcgcacacggaaacgatgaaagcgtcatgcagcttttcacggcttttttggcgttttccatgggctctgcgccaaaaagcgaagcagggcagctcagtgaaaaatcacgcagaagcgcgttttccgccatcatcatggcagatagaaagccgtctgcggattttggaaagaatttcatgcgtttccctccgttttcagcatgtcaaggcggtctaaaaggtcaagctttgcggtgatgtgctttttgagcgcgcggggcgataaaatctctcctgtcagccaaacgcctttcagcgtctcttcgcggctttcgagcgcccagcggatgaactccgccgtgtcaatccccataggctcaaagttcagcgcgcccggggagagaaaaagcatctcgccgcgctttgcaatcgcagtatcgatgcgggagacggcgaaaaggccgccgtctgcaaggtcgccgaggaaaagcaactcagaaaacggcttgttgtcttttgtgttgcgggcgaaaagctgccccccgccgtaaagatgcagcaggccgcccgcacaggagaccgtttcgcagtggcgaacgagaatgccgagcatggaatccggcagaatgcgaaacgcttctgcggcgttatggcccgcgccgtattccgccgccgaaacggtaagaaatgcgcggttttctcttaaaaggtctgtgaaaatcttagtgttcggggtcatagttttctccttatatcacgcgcacgcgcacttttgtgccgtcgggcagaccgcgcatctgccagcccatgtaagagcctgcgccgcggttatccgtgcccgcaacgtacatcacgtgcgcacctgcgccgccctctttaaagcacgcgcaggggtattcgtcgcggtcccagatgcggctcgccttgatcggcgcaagggaggcctttctgcgctctgccgcgccgccgcggtccagcgtcagtatatccggaaagccgatgtcctgcgccacgcggatgtgctcggcggtctcggggtacagcgcactgtccacaatacagacgaaaacgggcgcgtcaccgtggtttgaaaccgttatgctgccggggtcgggcgaaagtgcaatgcggttcagctttttcagataaacgccgcagcggtgcagagcatcgcttacgtgcgtttcggattgacggctttcctgtgcccatgcggcggaaagcgcaccgccggctaaaatgcagcactcgttcagggcctccaaggcgtccagtctggcgcgcaggcgggcggcctccgggttttctgccgtattgccggtttcttcgtccgtataggaagtagcttctgcgtctgcaagcgcacggcggcactgctcggtttccagcgccacgcgtgccagcacggagctcagcgcgaacgaaacgcgggcggtcacatcggcgcggtcgcggtcaaaggccgcaagcgtattcatggcgctgtccaccgcgcagagcaatacgtttacgtcgctcatatcacaaagcgcgcagctttgcggccagcacggaaatatactgcaccgcgtcgttcagcgcaagcagctgtgcgcgggcttcaccggcgtacagctctacgcgctcgtgcaagaggtcgtactgcgggtcatgccagtttgtttcctgtgccgcgcagctcaccgtaagcgcattataaagcgattccagttccgcgctgcgcgccgcaagctccatgccgaatttttcaagggaatccatgtcgtgtaccacaacgcttccgtttgccataacgatgccttctttcaagaatatatgtcggtgtctatgtgtgcaagttcgtgctctgtgccgaagatgaacgcgtaaatgtcctgctcggtctcctgcatacggcggcagagctgccaaagcggcaaaagacagtctttttcgatttccgcgtatttgcggtcgtcccagtcgtcctttatgcgctcaagctgccgcaagtaagccgtgagcgcgtccgtgtccgtcatgcttcacccgccgggcgaatggagcggctgatgtacagcgggtacgggaagatcttcgcgttttcaccgccgatttccgggcggtttgtgttgcagatgagtgtgtacggcgtgtagtcgttcaaaacgcgcggggtataggcttcgctttcaaggttcaaaaggtcaagcgcaaatttcacgcccaccagtgtcacaaagccgatgtccgtagaggtgcctggctcaaaatggaggcgttcaagggcctctgcttcgccaaaataatcgccgtgcgtgtcgcgcgccggggcgtcctttaaaagcgcggagaaggtctcgccgtaggttttcatgccgcggtttgggatgtggtagaacacctcgcccgcgtgggcgcgtgcccagcagcctacggcaataaacggtacgccgagtgtattggagagcgcatttgcaagcgcattcgcgcttctgtcatccgccgtcgcaaagacaatgccgttcttgccgagattttcaaagagagaaagcggcacgttttccagcttgccgcggaaagccgtcacttcggctgcggggtcaatgttcagaatatcctcgcgcagaaggtcagccttaaagcggccgaggtcgcgcataccgtgcgtgtggcggcagatgttgtgcggctttaaaatgtcgtcgtcgatgagcagaaatctgcccacaccggcgcgggccagttccaaagcggcgcgtgcacccacagagccgcagccgatgatgacggcgaactttttcagcatctcggcagattcaaacagacccgtgttacgactgaaaaggtcgtggatgagcgtaaagctgtccaccgtcagcgtgcttttcgcttcgtcgcaacggttgaaaagccagccgccgtccgtataggtgccaaaataatcgtagcccgtcagcaccacgttttcacgcaaaagtgccgtgtatgcagtacccgatacgatcaaaccgcgggtggtgtggtcgggatttttgaacgtatcggcataggtctcatcggtagccagaaggtagtagtagccggtgtctgcgctgcccgcgccggtcacttcacctacataatcattgccgggcaaagccgtgtcggaaagccccagcacgcccacgtgctcctttgccgtatccgtctgctcctcgcgcaggctctcgccgagctgcacggtgccgtacgtgcgcgggtcaaacgcgtttagcaaacgaaacgcctcgtcaaagtcgccggactgtaagtcaacgtcctctttttccgcgtttttcggcagacgctcggaaagtgcgtttaaaagtgacacagttctgtcgtgttcggatagatcagccggaatttgtctgataagctcacggcgtgtgatgatgattttttccacagttaagcctcctcggggtcaaaaatttcagcttgcaggcggtctttgttctttaaaagcgcttcggatgttgtcagctccaaaaagccggtacccgcaaagtatttgtcgccgaccatgaccggcacggtgcgatattcgccgtttttactgaggtaatagcatgtcaggcgcgcagtggggtcgagattgacgagcatcgaaaccgcaccgtttccgatgacctcggcaaagctgtgatttgtgcggtcgtcgtcgcttgaaaacgtgtcgagcgagccggggtggcggtgccaaagccccaaaagacacagcccgtgctgatataagcgcgaaagcaccgggtaaatgtggttgtggtagttattgtccatctcgtggtgggcgcgcgtgtgcagcgtgtaaacgccggggtcactcgcttccgccacataccacacggcatttttcacgttgccgaagaaaatgccgcccgtctccaacgggtcgcgggaatacacctcgctcagaacagagagatacgcgcggtttgaaagcactacgccgcggcagtcggcagctttgtcggattcaaacgggtggtcggcgcgctttaacgccttgcgctgcgccttcaaaagctttttgcgtttcttgtttttcttgccggaaagcaccggcggggtcgaaaagagtttcataaaaaaacctccgttaaatcttcccatgcgcctgaaaatccttccatgcttccggcttgcggatggcaagctcaaacaccatcagccagcggtaggcaaagcggaaggaggtcacggcgcttgtggtgcaggtgtcctccgcatgtacatccgccacgtcgctggagcaaatatagcgctcgccgcggttgtccgtcagcgtgtgcgggatgagttttttgccgtccgcatccagcggaatgtgcggcagcatgttgacgattttctgcaattcgccgagcgtcggcgaaacaagatacggcttcacggaggaagaatagcgcaccttcgggtggtcggggtcgtagacaagcttcattgtgtatgtcatggtgttaaagccgcggccgaggttcgggcgggtcttcacaagccagtacatgcggccgtctgacataaaatgcggctgcatgttcgggtcgttgaattccttgcgcatggcggcgacctctgcgttataaagcgccttgttcgtcttgtaccactgctgcacgggcgcggaaacgatcgtcttcggaataatggatttctttccgtcggtcttctccggcgtttctgccttttcctcgggctgttcttccggaagcggctcaggctccttgtgcagctgctcgataaggtcacccacggtgtccttttcgggcgcggagaccaccgtgtgcggaatgatctcctttttcgtcttcaccggcgctttcggttcgctgcccggcgcgggctttgcgcgctttttcggggcagaggcggggctcagcgtgccgtccgggttcatctgcaggtcttcgccgcttgtcagcaggtcataaacgcggtcaagctcgcttttcgcagcggaaacgaccgtcttcgggatgatggattttttgccctcggtcttttccggctgttctgttttttcctcgggcttctcttccggaatcgcctcaggttccttgtgcagttgctcgatgaggtcgcccacggtgtccttttcgggcgcagagaccaccgtcttcgggataatagatttcttgccgctgtccttcatttccggcttcggttctgccgtgccggggatctcgctctcgcggcggatctggttcacaaggtcgcctacggtgtcttcgggtgcggaaaaatacacgtgcgggataaaagttttcataaaaaaagctccttcaaagttcgtttaggcttgccgttttcggcttccacctgatctacgaaccgtgaggagcgttttttatagtcaaaattaaattttcaagttttttaaagcgccttcaaatatgccgccatgtcaaagtcctccaatttcgagtcctttcgcagatacagcgggtggtgcgggtgtccctttttagagggcttgcctgcctgataccactttgcatggaatgcgtcgccgatggccgtcatgtccgcaaggcaggttttgagataatcgcgcttttccacaatcgtgccccatgccgcccaaatgccgggctcttcgccgctgcgcgaaagtacccagcggaacgcgttcatgttttcctcgtgcagcgcacggttaaacgccttatccatgtggtcggggttcgtcgcacgctgcgcgtagacattgaacatgataaacgagtcaaacccgttaaaaagcgcaatgcgctctacggatttcagtgtgttgtcgaggttatccggctccgccgtcgaggggttgatgccgatggtaatgagcggctttttgccggcggtacccagtatgtaacggtattcggagtaaaaatccgggatataaagccatttttcgcggtcgtaaacggcgctttcttcgcggtgcttctgcgcttcttcaaatgtcagaatttcggtgtgctgcgtgtcgcttttcggaatgtgcatgtcggtctccttttgtcccaaattgtcgtcttttaaaagattataccgcgttttataccgcctgcaaagctgttttttcgcttttcttttcgcggtataaaagataaagcccgcaaagcagagaaagcacctccgccgtcggcacggcaagccacaagcccgtcagcccgaatatatttgcaagcaccaccgcacacggcacaactaagatcacgccgcgcaaaagagataaaacagccgcgtcccggctgcgctccgccgccgcaaaccgcgcgataagcagcagattcacgccgctcacaagatagtttaagaagtacaacatcaggcccggcacggcaagcgccgtcagctccgcgctacccttgctgaataccgccgtcacctgctgcggaaagagcaaagcgcccacggtaaacagcgcgcccagtaaaaccgccgtcacaacgccgcgccgcgtctgctttgtaagcgttctgcggtcatgttccgcaaacgcaatgctgatcagcggctgcacgccttgcgccgcgccggtcaacaccgccgttgccacaagcgccacgtttgcaatgatgccgtaagccgcaacacccgtgctgcccgcaagtgataatagcagatagttaaatattaaaataacgaccgtcgaagaaaactctccgatgaacgcggaaaaacccgccgcagaaattttcggaatttcctcaaaaatgcggtgcttcccgatgtgatacccgcgctttcgcgtcaggcagatcgctacgccgaaaatcggtgacatgccggtcgcaagcaccgcacccagcataccggcgttcaagacgcacaccatgtaccaatccatcataatattcgcaaaagagcccgtcagcatcgccgccatcgcgcgcccgggcgcatcgtcgttgcgcgtgaacgtcgttaagatgttattcaaaataaaaaacggcgaaaacaggcagcaaaccttcaaatagacggttgtcggctgtaaaaccgtgccggaagcgccaagcaatcttgccagatgctccgccccgaacacgccgcacagcacataaatgaacgacaaaacagcgcccatcagtaagcttgccgtaaatacgctgtctgcgttttcgtcgccgcgcgtgtgccgcagcgtgtaccgcacaccgccgccaatgccgatgagcagccccgtgccgttgatgataccgtagatcggcagcgcgaggtttaaagacgccaacccgtccgcaccgatgtaatttgcaatgaaaaatgtgtccgccaaaatgtagacggaaagccccagcatgcccaaaacgctctgggaaacaaaacgaagatatttgcgcatagtccctccaaaacaaaacgtgcccgcagaaaacctgctgagcactttaaaagcgcagacctatcggttttctgtgggcacgttcttccgcctacccggtggcagacggcgtgttcctgttgatttctaaggtactataccacattttcgtttgcattgcaagtttttcgttttgttttccacataggtgtgctatactgtggataaaagggggctttaatttgaaaaccgaccgcctcatcggcatcattacgaccattcagcaaaaaggcactgttaccgcgccgtatctcgcggaaaaattcggcgtgtcgcgccgcaccatcaaccgtgatatcgaagacatctgcaaagccggcatcccgctccttaccaaacagggcgcgggcggcggtatttccatcatggaaggcttttcgctcgatgccgccgtgctcacgcggcaggagctttccgccgtcctcacagggctgcgctcgctcgacagcgtttccaaagcccctgcatccgacctgctcgccgcaaagctcggcgcagataccgatataccgcgggacatggagatcgatctcgcgtcgttctacaaaaacgacttggcggagaagatcgagacgatccgccgcgccgcaaaagagacgcgccgcatcgtgtttcactattattacgccaaaggggaggcggataagcttgtcgagccctatcgcgtcgtgttccgctggggggactggtacgttttcggcttttgccccgcacgcgaggatttccgcctctataagctccgccgcctgtggaatttaaacgtgaccgatgaatttttcaccccgcgtgaagtcccgcctgaaaaagagccgaaccgcagccgcaccgaaagcatgacggatgattacattgtcacggccgtttacgagcccgccgtaaaataccgccttgtggaagaatacggccccgcgtcgttcatcacgcgggaagacggcaagctctacaccgaatggggattttctaccccggaggacgccctgcgttggcttttgagcttcggcgtcgacgtgcaggtgacagccccgcccgaaatggtaaagaaaatgcgttctgcgatcaaaaaaatgaaaaagcgctataaaacatgacaccccgctgtcatattctgtgtgttacgatctgaatatcataatttaggaggaacacacatgatcgattcaagatgcggactgcattgcacgacctgtacgtataaagagccctgcgggtgcggcggctgtatagagacaaacggacacccgttccacggagcctgccctgtggcgcagtgctgtcaggaaaaaggcttttaccactgcggagaatgtccggaactgccctgtgagttgttatggagctatacatgcgatcccgagcagggcgatacgccgcacggcgcacgcgtggaacagtgccgaatatggcgcgcggaaacgaaaggaaaaccgtaatgtacgatgaaaaaatacgcgccctgcgcatggagcgccagcatctcctcaccccggcgaatgaaaccgaatacgacgcgttgtaccgcgacctccagcccgggcagaacgtctactggaacggctttgggcaaccgcccacgctttcgttccgcgcggatttcgacgacctcgcctataataaaagccgccagttccgccgtgaactcatcaaagggcgctttgcgggcggcaacctcggttggatcttgcccgaagacctcgagcttttcgcagcgctgtaccgcaagccgctcaaaaacgcgacgatgacgcagcaaatgctgctagagcgtatcgaaatgtccggcccgtacaccatcgggcagctgaaagaggaaagcggtctgctcgtcaaggagatcacgcccgccctgcaccgcttgcaggaggcatttctcatctacgaagaccagtacgacggcgagtgggatcgcggctggtatcgcttcgacgaatttttttccgattttagcctcgaccgctataccaaaacggaagccctcaaaatcgtcctccgccgttttgcgcaccgttttgtgtggttcacgcccgccatggcgaaatcgttttacaaattgcccgaaaaagagatcaagctcgcgatagccgggctcgtgtccgaagacgttttggtcgagtccgacggcggctatctcctaaaagaagacgcagaaacgctcaaaacctacactgcgcccgaatttcacagcgtctatgcgctccaccgcaatgacccgctctataaagcgttcgagccggcgttaaaatcgcttgcaaaatccttcacagagggtttgccgtatgactgtgaaccactgcaatatcttctcgtcgacggcgtgttccacggcgcggtcgtcggccacttccgcaacggcccgtacgatttaaacgacgtgcgcatagatgacgcaagccttttatcacggaaagaggagatcatcgccgccgtgcaaaccgtaaatttcggtgcgctgccgcaaagatttatgggggagaagccgtaaaatccgtcggccttgttcgtagtcaagccgaggtgattttatgcaaagctttacgctccgtcccgccgattgggaagacctgcccgccttcaaacacatcgtgtgcacaacgctgaccgaagatattccggcgctttttgacccgaataaactgcttgaagataaaaagatcgggttcgagtacatcatggccgcagagcaaaacggcgaagtcgtcggcttttgctgccgttacgcctgccgtgatgccgacaccccctactgcgcggaaattttctcgctgtgtgtccttccgaaagcgcagcacagcggtattggtcgcgcctttgtagaggacgccctcgccatcctctacatcagcggctttaagatctgcaaggtctggctgcccgccggaaaccgccgcgcccgcgaattctttgaagccgccggctttacgcgcgacggcacatctcgcgtcgtgcagtgcggcgaagtcccgcatcttttttaccgttacgagcaccccctcacgcgcccggacaaaaaatattaccgatagcaaaaagcgcagccgtgtatttaacacaccggctgcgcttttatgcggatttcatcttcccgcagactttctacaaactcgccgaaagccgccccgcaaaaacggacaaaatgccactatacaatatactgctttgggtgtatactacccatgtatgcccatgacgatacaaaggggaaacgtgtcgtcccgggcggagtattacgtgtttagaaagttttcggttcgagaaaggaaaaagaaatgaggatcattattgccggtgacggaaaagtgggtcttgcgcttacgcgtctgctctcacaggagggtcacgaccttgtgaccatcgattccaatcgggcggttttggaacgggatatgcagcagttcgacgtcatgaccgtggtgggcaactgcgccaccatggccacgctgaacgaagcgaaggtacagcaggcagaagtgctcatcgccgccacaagcgccgatgaaatcaacctgctgtgctgtcttacagcaagaaaaatgaaccccacgctgcacaccatcgcgcgtgtgcgcagccctgaatacagagaacagctctacatgatgcgcggcgagttcggcctttcgctcatcatcaacccggagcgcgaggcggcaaaggagattttccgtcttctgcaattaccgggcttcttaaagcgcgaaacattcgcaaaaggccgtgtagagattgtcgagctgcgcgttttggagcgcagcccgctcgaaaacgtcattttaaatcacctgccgcacgtgctgggctgcaaggtgctcgtctgcgccgtcatccgtgacggccacgcactcattccgtccggtgataccatgctgcgccgcggcgaccacatctacgtcaccgcgccggttacggtgctttcctacctcatgaagcgcctcggcatcacgcagaaaaagatccgccacgccatgctcatcggcggcggccgcgtcagctattacctcgcgcaaatgctcatcggcgcggacgtccgtgtcaagatcatcgaaaacaacccccagcgcagtgaacagctcgcacaaatgttgccggaggcggcgatcatctgcgcagacggcgccaatcaggaaattctggaggcggagggtctcaacgaaacggacgctcttgtcacgctcaccggcatcgatgaacagaacatcatcacctccatggtcggcaacgcaaagggcgtgccgcacattgtcacaaaggtcaatcgcatcatgacgaccggcatggtggaaacgctccccatcggcagcgtcgtcagcccgaaggagctgtgcagcgcgaacatcgtgcagtatgtgcgcgccatgcagcaccaaactggtgccgccgtcacgctgcaccgcattgcagacggccgtgccgaagcgctggagttcatcgtcaataagcagtcgaagtatatcggcgagccgctgaaaaacctgcgtctgcgcttaaagaaaaatattctgatctcctgcatcacacaccacggcaacacggtcattccggacggcgaatcgtactatcagctcggcgataccgtcatcgtcgttaccacgcgtgagcagccggttttgcagttcaacgacatttttgtgtaaaggagcggctgcacaatgaatgttaaaagtatcagccgcaccgtcggtttgattttgctcatcacgggcatttttcagcttttcccgctgctcatcgccgtcatcgatcacgagccgagaaatatactcgcctacatcgagtcgctgtgtctcattctgctcgtcggcagcgcgcttttgctgttcagccgcggcggcaaccgcatgttttccgcgcaggaaggctttgccgcaacgggtctttcgtggattttcatgtccgcgttcggcgcactgccgttctttttaagcggccagatcccgagctacgtcgatgcgttttttgagatggtctccggctttacaacgaccggcgcgtctatcctgacggatgttgaagcgctctcgcgctgcaaccttttctggcgcagcttcagccattggctcggcggtatgggcgtgctcgtgttcctcttggcagtcgtgcccggcgcgcgcaaaaacggcggcaccggcatctatctcatgcgtgcggaaagccccggaccgagcgtcgataaattaacgccgcacctgcgccaaaccgctatgattttatatggaatctacattttgcttaccgcgctgtgcattgtgtgtcttttgctcggcggtatgcctgtgttcgacagcttctgcatcgcgttcggcacggccggcaccggcggctttgccattaaaaacagcagcatgggcgggtacagctgcttcctgcaaaccgtcgtcaccgtgttcatgttcctcttcggcgtgaacttcagcctttattacatgctcttgctccgcaagttcaaagcggtgttcaaaaacgaggagcttcgcctgtatttcggcatcgccgcaggctccatcgttctcatcgccatcaatatcagccgcatgtataatacggtctacgagtccgtgcaccacgcggcgtttcaggtcgtcagcatcatgaccacaacgggctacggcacggtcgatttcgagcagtggccggcgttttccaaagcaatcctgctttcgctcatgttcatcggtgccagcgcaggcagcacgggcggcggtctcaaggtctcccgtgttttgctcctgatgaagagcattcgccgcaccatccgcaaggcgctccacccgcgccgcgtgcagcccgtttatatggacggccgcgccgtcagcgaggaggtctgcgacaacgtcaacgcctatctcgccatttactgcgtcatcctcgtgctcagcttcgccatcatctcggtggacggcttttccatcggtaccaatttctccgccgtcgcgtcctgcttcaacaacatcggccccggctttgagcttgtcggtgccacacaaaatttcagcatttacagtgatctctcgaagattatcctctcgctcgatatgctcctcggcagactcgagattttccctctcctgctcctcctcagccccgacacctggagccgcagaagataacttttgcaataaatttgcacggataaattgcatcagatcctaaatcggaaaggaaatttaccccatgtacaataaaatgaaaacgggcgcgctgttcaacggatgagccgccacatgagagcggaagcagggacttccgcaaacacctttcgcgtctattcgttctcttatctgcgcgctgcggcgtgccttgccatcgtgcttctgcacacggtgttctgtgccgtgtcccttttcccggaggaagcatctgccacgcaagccctcctctccaacatcgtcgtcaacaacatgatgtgggcggtgccgtgctttttaatggtttcgggtgcgctgcttttaaacccggagcgttccgtcacggtgaaaaaatgccttacaaagtacattccgcgcatgctcatcgcgctcgtcgtgttctgtcttctgttccgcgcattggagatcctcgtcaatcacgagcccgtcaatgccgaaacgctactttcgggcttttataagattttctccggcacttcgtggtcgcacgtctggtatctctacctcatgatcggcatctatcttcttttgccgttctaccacaaaattgcgtcgaacagcacggcaggggaactgcgctatctcatgattgtctacgtcatcttcctgtcgcttgtgcccgttttaaaaacgttcggcatctccgtcgggttttatatctgcgtttccgccatttacccgttctacctcttctgcggctacgcattgcggcagggcgtgtggcgcgtgaatcgcgggcttggcctgctgtttctcctcatcggcacagcggcggtcgttctgttcaccgtgctgaaaggaaacggcaccataaaggccgcaggcgtgttctacggctattcttccatttttgtcattctccagtccatcggcgtgttcacgctgtttggctgcgcggcagacaaaaccggcgcaccgcgaaaagaaaaatctcccggcgttttcggcaagttcgttttgaagattgataaatgttcgttcggcatttatctcatccacatgatctttgtgcgcggtattttaaagcacacgaagctccacccctacggcgcaggcagtccgtttgttttgatcggcctgaccctcggcatcttccttgtctcgttcatcctaacgtggattctgaagaagatccctggggttaagaaaatcctgtaaacgaatttggaggcacactttcttgtgaagtgtgcctccattatcctatcggttgaagacggctatattcatttcccccaaaatggaaatatcatgccgcatacatacgcggtatatcacagtttcaccctaaaaaggaagaaacggcaaaagaatacgcgctttttgcttgacatttttgtgctttttccgctacaatcaaagaaaaaggggaggcgctgctatgttcatcaagtcccgtattctgactgttctcgattgcatgcccgtcgtcgcttgccttttgtgcattcggtatctggaaaaaacgttttacccggggcatttcagctccggaaaagcggccgccgtcacgcttattttagtggtgtttttatactacctcgcggcctttacggaggagctcggtcgcctgctttgcggacttttaacgggatacaagttttcgtccttctccttcggtcggttcacactcgcaaagcaaaggggaaagctgcgcctgtgccgcacatcatccaaaaagctcaactgcatcatggtgccaccgcccatggaaaacggacgtttcccgtataagctctactacctcggcggcagcattttcaacctgctcctcgccgcctgtgccgcgtttttggccgtgcggtttcgcgtagtgcccctcgcgctttgcgcagccgcagaagccgcgtttctcttcttctggtcggcgcttataaatttcatcccgctgcgcacggaaaactacataaaccacgcgtgcagcgccgtcatggccggcaaaacggaagaaagtctttcacgttgccacgcaaagttaaatcgccttgctgccgagctctccggcgtgcgtatgcgcgatatgccgaaagactggcttcacatgccgcgcgattatgagctccgcatggcagacggcgcagaggaagcgtttcagcttcactgcaaacgcatggatgagcaccgtttcacggaggctttagagattgccgaccgcattttcgcgcagaacacagaaggccccttcccattgcagggcgatctgctcaataactgcgtttacctctgcctcatggaagacaagtccgccgcaggctataaaacgcccgcgtgggagctttttcgctcgcacaatgggggaaacctcgctgccctgcgtacggagtatgccatggcgcttctgtatgggaacgacgccgaagccgcgcgaaaaatccgcctgcaattcgagcgcgtcgcgctgcgttatcccgcccccgccgatgtcgaaaccgagcgcgagctcatggagcttgctgccgaaaaacaccgaaaggaaccttgacatgtccacactccacatggaaaagatcacggagcactctaaagattttcaccgcaccgaaaacctctacgtccgcgcgttccccgcaaacgagcgtacgcccatttgcggtctcatgcggcacgacggccacgatttcgtcggcttctacgacaaagacgaaaacttctgcggctttgcaagcctgctcacctacggcggcatcacgcacattctgtatttcgccatcgatgagcagtatcgcgagcacggctacggcagcgaagcgctaaagctcatgcacacgctgtacccgaaaaaccgcttcatcgccgacttggagctcgacattcctaccgccgaaaacgagccccagcgccacctgcgccgcgcattctacctgcgcaacggctacaccccgtccgaggtacgttacatctggcagggcgagcagtacgaaattttagtcagcagcggaaccatcacaaacacagaatttgaaaacttttgggatcactttccaaatgatgaagatcggtgatcttcatcatttgtgatcacggacaactgataaaaacagacagacttcaacaaaacggtccggatcgtttttgatgaagaccgataaaaaggagcccgccatgacccaaagaacccccgaagaaatgatgaatctcatcctctcccgtgccgaaaacgacgcgcacatccgtgtcgtcggcatggaaggctcgcgcacgaatcaaaacatcccgaaagaccgttttcaggatttcgatgtcacctattttgtcgatgaccccgcgctctacaccgaagacgacacatgggtaaatgtcttcggcgagcgcctcatcatgcaaaagcccgaggacatggagcttttccccgccgtcgaggatgggtacagcttcttgatgttcttcacggattacaacaagatcgacctcacgattttgcccctcaccgcgctcgaagactatttaaacggcgacggtctgcgcgagattttgctcgataaagacggtcgcgtcgaagaaaagcccacccctacagacaaagaatatcacattcaaaagcccggcgcccgcagctttgacgactgctgcaacgagttctggaatatcacgatatatgtcgtcaagggcctctgccgccgcgagctgttattcgccatcgacttgcttgcgatgatgcgcaatgaacttcttcgcatgctctcgtggcaggtcggcagcgcatacggcttcacgttcagcgtcggcaaaaactataaattcatcggtcaatatctccccgcagagcagtggcaagcgcttctttccacgtatcgcacagattctgtggaaaacacatggcggtcgcttttcacctgccacgagctcttccgagatgctgccaaaaatttcgccgcaaaatacggctacacctatcccgattacgacgaaaacgtctcccgctacgtccgcgatatgtacgcggaatacgaagcaaaataacgcctctccccaaaagagtctgcaaaattccccgaaaatcgcccgccgcaactcaaaattgcggaaattccaagttgacatggtggcttttcccacggttttcgtataaaatgagcccagcaaaaggaggtcttccgtatgaccataggagccaaaatcgccgcttgccgcaaacgcgccggcatgtcgcaggaaaagctcgcaaacgaactcaacatctcgcgccaggcggtttcccgctgggaaacgggtgaagccgtgccggataccgaaaaggttattcagctaagccgcattttccatgtcacgaccgattatttattattggatattgacgaagccccgcaaagcgcagcctccgccgaaaacaacagagaaacggaacagcgcgccgcagaaaagcgaatgaagcgccaaagcatgcgcatgcatttcggctggttcctgctcattttcggcatcatctcgctcaatgcaacgctcgtcggcgcgggtctttacgcgcagacgctcacggaatggcggacaaacctcggccgctacggcaccgcgctgttcgattcctggatcttagcactgttcatcgtcagtgccgccctcaccctctgcggcatcctcatcctcatccgtgaatacatctttatcggcaaagagtaataattagggcaaaataaaagcacgcaggcttgaattcctgcgtgctttttcattttgtcactacggagaaagcccgctaagccgcagcaaagcctgccatgtcagcggccctacgatgccgttcacgtctaacccttcgtgcgcctgcacggccttcacggcattctccgttgcttcgccgaagatcccgtcttccgcgacctgcgggataaatgcgttttgtgccgctgcgcggttaatgagcgattgcaaatcttccacatccgcgcctgtgcgtcccctgaggattgcccgcccggggtagataagacgacttacggacttcccgttttccgtcgccatcgcccgcgtgtcgcggtaaacagaaagaagcatattcgcgctttgccggttgagtacgcccgtcggctccagtccgtactgcgtttggaaggccatgagcgaatttttcgtccgtgcgtcaaatacgccgttcatcgcgggcaggggaatggaattgtcaaaatacgcaatgatcgtcagtaagttctgcatctgttctaccgccttgccgctgtctccctctttcagctccggcgggtagaatcgctcggcatcctcgggcgtgatgccctcgctcatcagctcgtttaattgcttgatgccgctgtatatgagcttgattttgtaccatgtcgccttaccaaccacgccgtcgggcgttaaattgaaaattttctggaacgcccgcaccgcattttcggtcggcaggtcgtaatacacgctgatctgcggaatgcgcggaatcgccgggtaattgtcgccgatgcggttcagctccctttgcagcacgcgcacactttcgacgatgctcccaagtcttaacgccacgccggggtatgattcctcgttgttcccaacaggtgcgttgaacacaatgttgatgtcatcgccgtagaaacgctgtaaaatctcatacggcacaagcccctgccgcgctaatcccaccgtgccccactgcgaaagccccgggcatgtcgaggtcgtgccgttgcagtactgcgtaaaatacggctgcaccgtgccttgctttacgacgtaatcgttgaaaatatgatcgacgatctgcgagatgttttcaaaaatatcgcggttcaaaataaacttctgatcgtactgcgttatcgaggtgatgtcaaagtcatacccgcggctgcggtaatactccgtgtaaatgcggttcattgcgtaagaaatctgcgccagaatattcgcatgtatcgcgctttccggccagttcgggtagatctcgctcgaagcaacgtttttaatgtacgccacaaacggtacgcgcacattctcggccggttggtccggcagcccaaggtgcaccgtgatgtattccggcacaacgggcgtgtctatattgttcggcatagcatcacctctcaccgaccgccaaaaactgcaccggctgtatcgacgtcacaccggggaaaacaggcaccgcgcggtaaatttccgtgcggcatcccgggtggctcacgcgtatatcgtaaagcgcatacggcatctcgcccgtcggcgactgcgccaacgcgttattcggcgcgggcagcaaaatgtcgccgaaaacaccgctctcgtccgtcatcccggcagaaaaccgccgcgtgccgtccgcaaagtcgtgcgtcacaagtaccgaagcgccggggacggggaatgtccgctgtcccgcatacgcctgcacgcgcagcgtgcccgttttggaatttagctgttgaaacacctcaaacgtgcacgcctcgggtgagagatcctgcaaaggatcgcgccccgcgccgccctccggcggattttcaatcggcgcgttctccgctatgttccgcttgacgtctctgtccataaagtccctccttttacctaaccccagtataagcggcagaggggaaaagagtgcccactttcgttcgagtaaatctgccattgcagcgcataacgtcacatttgaaatgtataatttgtgcactgcaatgagtttaagctttcttcacccagtccatcgcgatccagcctccggctttgagacggccccagcctttatgggagccggggccgctgcgctcttcaacgattgtgtagcgcagcgtatctttgatctgccctaaaatgccgtagttcgtgctcggacccttgcggatgttgagcgcatcgcggcaatttttgcggatgagatagggggtaaacttgctcgcgacgggcgtttttgccggctccatatagcgtttcaccatgctcaaaaagcgctgccagccgcggtcgagcgtcctgtgcgggcagtacttgccgtcatagtcccggtgctttgtcatcttatcgatgccccagccgtactttttgagcaaactcgcggtgaactcggccgcattctgctcggccttatcgaacttttcaccgcccgatttggaataacaaatttcaatatggatgccctccatgttgcccttgccgtgcccgtcgccgcttgcccacgcgttgcggttttccgggatgccctgcacaatgtttacatcgtccaccgcgtagtgaaacgagatctcaaggtcattataccgcatgtaggagatctcatttgcggcgggcgcatcgtttgccgtgttgtggatgacaacgcgcgtcggtgtgcgggtgtacgggcatttaatggcatatttgtccttcggcacaagattttctttgatcggtaccatagctcctccttacgcttttacgccccggattttgaccttgctgccctttgtgccaaggctcaaaggggcctcgacattataggcattgcagtttttcaatctcatttcatgtgtcatgttcgtcttccttttcgttcacggtgcttttcaggcgagaaagtaatcgattgaggcgaggaaagcccggcacaccgatggcggctaagttttccagcaccgagatgagctcgttgatgatgagccaaacggtgacgagcaggccgcagaaaagctcgatgtgcaggtcgatgcctgcctgcttcagtgcgccgtgcagcaggtaatccaccgccgcgcctacggcgaccatggccatatagcaaagctttttgagaatacccttcacgccgatgcgcgagctgagctgtgagaaaatataggcttttgtcatgccggtgaggtaatcaagcaccatggcaaaaaatagcaccaaaagcggctgcgtcagcataccaaagtacgaggaaagccctgccaacaccacggtaaaagcggtttttaacatagtcggtttcataaattccaaataaactccttttcaaagtctccgttttcaccgcggtgcggcacggcaaaacgggcggcgtctgccgtgcggagcagatgccgaaattcaggaaaagaaaagagaccccacgactttgccgcggcagtctcaaattcttttgacaaggggaagtgtgcgcggggaggatccccgctttttaaaaggcgaaacggcggaaagcgaaacgctttcaatcgcttttcggtgcagccgccgcatgtggcggtccgagtagtgcatgcgcgctgcaatctccttgaggtcgagcgcacagatgtaatgctgtgtcaaaatctcacgcaaagcggcactttccaccgtgtctatggcggcttcaatttctgcctgccttgtgcaaagcacgcgtatggcgtcttttgctgcgcatatcgcgtgctctaagtgaaaaagaaggtcggtatttccttccaaaatcagcgcttctttgcgcgctgtcagccgggtgagctccgccctgcgtacacggaggtcgagctccgtgtagcggtaggcggataaaaacgccttcacggcgttaaattctgtatcggtcaagactgcacgacctctcgcaggcggtctgcaaactggtctgaaagggaatatatgttcttcatttcttcacggttcggcagccccgtaaaattctgcacactgcggcgcacggaggtgcttttcgcgcggtgcgcagatttcgctacaagagagatcaagaaaaccgcaccctgtgcaagcgcgattaacaggcaggaaacggcaatactaaagagaaacagaatcataaaaatacccccatccgagtttcgcttgtgcgttgatgcatggtacagacggttctgtgcggcatatcagcgctttacgaacgtttgtttctttgctatctcgtattataaacaaacgttcgcaatttgtcaatcgaacattcaaagatttttcggaaaacgaggttttaaagggcaggtgtctgctttttgcgacacctcaagaagatttgaaaagatgtccttgacaaggggaaaagggctgaaacagcacgatcttaccccatttttccgtatcccgattacagtaatacgcgtggatgctgtccttttgcgggacgtcaaaggctgttgctgtaatgcgggcggtatcgggcagggcggcacgcagattttcgctgtcgccgacggctgtaatatggatgggcgcaagcgccaaaagctggggcagctcgctgcgcacgattttgcaccggcgctcaaacacgacggaaaggcggctgtgtgcgacggcgtttttgagaagcgccgcgtccgcggatgggcgcagtgtgccgagcggctgggtgaattctttttccgcgctcatcttcaaaaacacgttgacggcgcgattttgaccttcccgaagctgacgggaaagcgcttctctctgtgcggcaagtgtggtataaaccgtggcggtttccgggcaaagccgcagtagcgggtgattttctgcgcagaaaatatgcagcgaaagcccttcctgttccgcaaaccgcgcggcgctgcacagcacagaggccggcacgcgcaggtcgctgcccgtgcacagaatgtgcgtgccgttcggtgtaaacgagacaaggccgttgtcttttaagctatccgcatcggaagcggcgcggtccttatgcaggcatacggagtcgccgaaggtgacttcgccgtgcgggagtgcgctcggtgcagcacgggaggcggcgttatgccgcagccacgcggtttcgcccgtaccgtttacgcgtggcagcaggctgcacatgcgcccgatgaggtcatccccggcgtaaaagcattgcacggagacggtggcgcgctcggtttggcccgcttcgtcgtttaaaagcgcgtggccggttttcagcagcacggcagccgcaatgccggcgttttcgcgcccggtatcgaccgcgcggtcgctgaaaaggcggcgggcggcggcaggcgggcagcggaaaacgagacgtgtggaaaagtggtccttcagctcggccgtgaacgtgttgcgcgcgctttcgcttacgccgcgctggctcgccatgatgaggtgtacgccgtaggtgcgccctttgcggacaatctcgcttaaaagcgcggcggtctctgtgttgccctcaaaaagcgactggtattcgtcaatcataagcaaaatgcgcggcagaatttcggacaacgcacccgtttcgcgctgcacggcgcggtaggtctcgtacttgcggatgaggcggccggtctcggcggaaagtgtcataaagcagctttggcggcggtgcagctccgaaacgtagtaccgaagaaaggatgcggcgcaatcggggtcatcgttttcaacgacggcttcgactgcgggcaggcacgatgcgccgtaaagcgcgaactccgcgccctctttgaaatcggcaatggcgagctttacttcgtccggcgtgtagtttgcgaaaatttgcagggcaacggtatgcagaagtgcgcttttgccggagtttacatcgccgatgacgagcgcatacggcttttcttccgtaaacgcaagcgtgacgggctgacgagtgacatcgctttggccgatgggaaggaaaatgcccgcttcgctgctctttttctgccagccttcggcatgcggcagacgagcgttgagggacagcacggcggcttttttaacctgcgcggtgacggcggaaagcgctgctgcgcggcgggcagggagatcctccggcgggacggtgaaaacgtcttcggagatataaattccgttgttttttgcggtgcagcacgcggcgttttgcacgagcgcggggaatttctgttgaaaaccgtgcggcagggagattgccttgcgcacggaaacgagcacgcgcacgcaggtgttggcgcgcatgagccggataaggtcttccagcgtctgctccgggatattctgctccatgttttcgatgaaaacgtaatgcatggcatttggtgcattttctgcggcggcgcgacacaaggcctctatgccgcgggtaaaatcctgtgcactgcaccaaatttccgcgcggccgctcggcgtaaacgcagcgaaaacgtccttgtacgcattgccgcagtgggcgggatctgcaaggtgcacgacggcggcaggatcgcttttaagcagatcgagcgccaaactgcaaaagagcgcgtgcggggcggtgttatccgttaaaaacagcacgctgcagtcgagccttgtacaggtaagcggcgctgtaaacattttgccggaggggagcgcgatgcgcagcgtgccgagggaaagcggggcatgtccggcgttttcggcgaaaattgtagcgcttggcggtgtgcagagcacagcgtttgtgcgggtgattgcggtttcggtatcggcctttaatttttgcagaatcttcgcgcggcgattggtacattcggcttcaatctgccgcgttttgcgcgtgcagacagcgtgggcgcgggcgtttttttcggtaaacgcgggcgcgttttctatggcctccgcgcagcggcgcatgtgcgcgtaggcgtcgaggatgggcatgtagagcgatttgcggaaatccggagaaacggagccgatgagccccgcggcgtccggcagcaaaaacgcgtttttgattttctttgcgccggattgaatggcggaaagcgctttttgcatgcgtgcaatgagtgcttccgcgcacacgtttgcggtgttgtacggcttttgcatggcggcggaaaaatactgcggctgcatgcggtgaaagtgcggatcgagaatgtcgttcatcgcaatctcggcggcggaaagcaggctttcggcatcgcctttaagtgtatcgtactcgtgcgcgaagtcttctaaaagctcgtcggtggcgtcctgtacggcgcagacgcggcgttctctgttttggtcgttcaggcgcagcgcggtgcgggtctccgcttccatgcggcggagcgtttcatgcagcgcggaaagcgaagcggcggtgccgtttaacgtgcggaaaacggcggaaaacggtgcattcatgggaaaactccttttcgaaaaatttagccgaacgccattttgacgagcccgatgatgccgagcacgagcacggcaagcgcgagcgccataaggatgggcgcggccatgagtacgaacacggcggcgggcggcgcaaagcagcagatggagacggtgcagaggtaggcaagcacgttatagcggtgctttttcgcgcccgttttgccgtaaagatagatgcagaatacggttagggtgataacgagcgctttggcgtgctcaaacacgaactgctgtacgtagtcctccaaaaaatcgaggtgtgcgggcggggtgaacgctgcctgcatctcatgaaacacgcaaacagcagcaaagacggaagcggaaagcgcgaaaagccagtaaacgaattggcgcgcaaagctgacttcgggggtgtcttcggcggtggtatcggcaacggcgggggctgcggtgtgctgtgtgcggctgcggtgctcggcttcgcggtcgtggatggtgccgtcttcggcaatgtaataatccggcataagagcctccttatcggaacggttcggggtcgtcgtcatcggtctcggcgatgtcgccgccgaacagggcatcgaattcttctgcggcagacgcggggtcaagcggctttgggcgggcggtcatggctaaaaagcgctgcgcgtcttcaagccgttttttgcggtctgacgcggagggctttagcttctcagcatcgagccctgtcggaaaaatcacgcccgcagcggctttttgcagctctgcttcgcggctatacaaaagcgaaacgaggatggaaacggcggaatacagcgtttctccgagtgatgtaggaacttccagtgcggaaagggccatttttgcgcacagaccctccgggcggcggccgacgaagagtgcgccggactttacggaatcgttttccgcgttgcagatctgcgcggcggcgtgcaggtagcgtggatcaaaaacaagggcgttgcgaccggggaacaggcgcaggatgaaaaaggtcttctcatcatttaaggtgacgtgcagcttccagcggcggtgcgcggccagaaactcgtagaggtagcacgcgccggtttcatcgggcgcatgttttgcaagcacggtaaagtgcgttttttgaaaatattcctccatgaggggcagaaaatcctccgcgtgggacgggacgggagacggaatgtggatctcctgcggctccgggagcgcctccggcagtacgcccgcgctgagcgaacgcagagcgctgatgtgcggcgtgagtgcggcgaacgcggtgcgctccaaaagctccagtgtggcgcgggagacgggcgcgtgctcaaaggcgacctccgtgcggtaatagacctcgcataaattggactctacacacacgacgccgacctccggcgtgatgcgctggcagtaatcggcggccatcggcacgtaagacgtgcggactaaaatgccggggtaggcgcttaaaagcagaaagccgagctctttatccacgcgggcgcaaaaaacgagcgaggtgcggccgtccgttttgcggtacaaaaaaccgggttcctcgtcgagcttttcaaagctgtccgcggtctcatccaaatatgttttgagcatttcgtaggtttgggtgctgttttgtgtaggcaaagtaaaaacctccttagatccgtttgttttcacctttactacgaacggcgcatacgaaattttgagcgcacaaaagaaaaatgccctgttcttttcacagaacaaggcattttaaagctcaaatttagttttgtgtcggtgcggaagcggtctctgcgatgtttaaaacgtgctttacaaggcggtgcgttttgaggtcgatgggattctgcgggttttcgcacagctgtacgtagcagcgctttaaatcatccgcgtagctttggaacgtcacaaggtcgaacgcgcgctggcagcacgtgagcgcttcttcaatatcggccttattgcggtaatcgctttcaatgacgagcgctgttttggcgagcgccagacggtagctgaagtagcccatgtgctcggaattctgctcggcggcagagaacgaaagtcccttttgtgcaatgcgcaggatgaggtcgtattcaaggcttttcttcagaatttccgtaaggtacagcttgcagcagtttgcggcgtttaagggctgcgggcggccgtttgcggtgattttctcaaaaatgacgcggcgcaggacgttttcggcgtctgcgatgcggtttttgtcgagcagcacggtggcttctttcatgtaaccacgctcatcaagcgggaaaatacgctgaaaatcgcggcagacggagagagctttttcaaaatacgattcggtctgctccggcgggcagcacaaggcgcgggtgcggcaatactcggcggcgtctttaaaaagccgcggttcgttccagttttcgcgcccgaggctttcggctgcggcaagataggtttcgccgtccgcgccgctgcgggcgcaggtattgagcgtgatggcgagcaacgttgcgctgcggggatagattttaagtgcaaaatcacacacgcgcaaagcgtcgaaataatcgccgagcgcctcaaagcggtcgatgaggttgttgaaatcgccgacagtgccggtgatgtggttgttttcatccgagacggcatccgcaaggctgcgcatgaacgcggcgttgccgtgcccgccgtgctttctgagcaaagcgagcgcttctgcggcggagcagatatgcggtgtgtttggggcgataggtttaacaggggtttccatgtggctttgcacctctttttatatgggttagtttgtttttttgaacggctctgggagagccgttaggggaaccccttaatagggttcccctaaacggaacagtccaccggactgttccgttttcccctcctgattttttggagacaaaagggtttcgccatttgcgaatggcgactcagggcattgccccgagaccccacgacctttttgaaaaaaggtcgatcaaaaactttattcggcgattgcggtcagaaattttcattcagcagttcaatgacatcgcaggtttccgcaagcattttgaaattccgctcgccgagcagggcgcagaggatgacgagtgcgacgccgcgatgaacgttgttttcttcgctgcaccgttgccacaggtggtaaagctcgcttagctgcggcgaattttgcagcacggcgccgagtgtggtctcaatcacgctcggaatcagcatacgctccaaatacgttttgcagtttcgtgtaagctcacgcccacgccagccgctgtcgttttgaaaatcctgctttaagtcgaggagcagttcgcttgtaccttcgccgccatacaacgctctgcggtcgctttcttcggggtatgtgcacaaaatgcgcgcccagatgctttcgggtaaaatccagctgtaaaacgcgtcctcggcgacggtgtcggctgagccgggctccaagctgagcggcggaagcttttcgatatagccgacggactgcaaaaaccacgcttttttatacatactgtcgcccataagcagcagatagaccgtatcgagcgtgaacttcggggcgctttccgcaaaaacgggcggcaggctttcgcatgtttcttcggttttggcggctgtgggtttgattctttcgacgctttccgtaaacgcgtagccgatgccggttttggtggtgacggcgccgtttagcccggcttttttcagcaggcggcgcacggcggagacggtatcgtaaatgaggttgctgacgtccgaatcgacatcatacccccacacatgcgcggtgatttgctcttttgtgagcgtttgcccggcgtttaagacaaggtagcgcagcaggcggttttgctgtgcggtgaggtcgatgaccgctttatcgttttttaaagtaccgcccgtggcgttatacgtgacgttttggattttataaagctcgtccaccgcgtttcctccttttttatggataacccgattatagcattgaatgtgcggttcttcaacgctgttcggcgaaaatcgagaaaaaatcgagaccgtttcgggatagtaccgagaaccgttttttatccttaaagcacaagaaaaacgctttaaggaggaacggatatggcagcgaaggtatttgaaaagagcgcggaggaaacaacgttccgcgcggttttaaaagaagtgtacgaaagcggaaaaaacagcgttgctgtgctgtgggcggacgcggccctttccgcacgctttcaggaaaccctgtatgcgtttcttttaaaggacgttttgggcagtgctgcggcgggtgtaaagctgcgcgcactgtgcgctttttgcggcggcgaagcggagacggcgcagaccgaatacacgcacgagacgttcatcggcctgatgagccccattacaaagggcgaaaacaagggcgcagtgcgccttgatttatttttcaaaaagggggaggcgcattttatcccgacgctgttcgcgtatgtgatgaataatatcctcggcgatcgctttaaaaaagccgtgccggacagcttagaccgtgagcttgagggtgaagacggcagcatggcgcttggcgcgagtcttgcgggcgaagaaaacacggagcgcgaggtgctgggcgagatgatgagtgccgacatggtgcaggctgtgtacgagacgctgcacgaccgcccggacgagcttttcgcctttgcacacaagcagagcgagggccagatggactgcaaaacgcttttaaagacgctgcgccgcctgcgcacgcccgaaaaggtttatctggatgcgatggcgctgctgggcgctgcggcgcagaacaaggcagagtgggacgaaaaggccctcttacgcttgaaacgcattttaaaaatggacgattgccgcgccgccgcggagctttccgcttgcgcaaaccgcgcgaaaacaagattgaagaagtccgcagcgctgcttgccatgcggtaaggtatggggtgcataaaatcaatgcgcgtttgggtcgggtgcatcggtcaaaaagcggacgggggcaggggtatcggtgtgcgtgccgatgcacttttccatccagatcatgtcgtaccagcggccgaatttatagccacattttttgaacgtaccgaccgttttgtagccgaggtgggcgtgaaaatcggcactgttgtggtttaggtactcgtcctccttgtcgatatagccgatgcaggcgtaaaggtttaaaatgcccatatctttgaggcgctgctccatggcttcgtagatctttctgccgaagcccagttttttggcggtgcggtcaaggtaaacggtcatttcgcatgaccaatcgtaggcggcgcggccgatgaatgagcccgcgtaggcgtagcccatgaccttgccgtccgcttcgaggacgatgtacgggtagcgcagcgtgatgtttttcatgcggtgtcggaactcttcgagcgacggcacgttgtactcaaaggtgatggcggtgttttttacgtaatagctgtaaatttccagcaggcgcggtgcgtcggaaagcttggcgtcatgaatcaaaacagtgctcatgaaaatacccccctaaaagctcaaatacaaatcgtaaatttggaaaaagcatagcaccgccggggtgaagtgtcaacccgggcggtgccgttttgcggcaaggacgatattttctcgggagtttttgccggccttgccgagaagcaacttattatgaccggagaggagcgctgcccgcgggaacggtgcaggagaatatccgcgtgctttcatgatttgttcacgaaaagttggaaattttgagattgactttccgccaaaaaacgcatagaataggctaaaataatatcgcgcttattttcatcgcgcgcgagaggagagagaacatgaacgaagtgaaaacgccgaaaaagccgcttattttttattacggcattgcgatggtcgttttgctgcttttaaacatgctggtgatgccactgattacacagcaccaggtggaggaagtggactatggcacgttcatcaagatgacggagaacaaagaaatcggtcaggtggagattgaagacaaccagattttgttcacaaataaggacaagagcaaaatttataaaaccggccttttgaatgacgacggccttgtacagcgcctttacgattccggcgcggagttttccggcgagattgtggagcagatgtccccgctgatgagctttatcgtgagctgggtgctgccggttgtgctctttgtggtgctgggacagcttttgtcgcggcagcttatgaagaaaatgggcggcccgaacgccatgaagttcgacatgggcaagagcagtgcgaaggtgtatgtgcagtcttcggacggcattaagtttgcggacgttgcgggcgaggacgaagcgaaggagaacctttccgaagttgtcgattacctgcataacccgaataaatataaagagattggcgcttccatgccgaagggcattttgcttgtgggccctccgggaaccggcaaaacaatgctggctaaggcggtcgccggcgaagcgaacgtgccgtttttctccatgtccggctcggaatttgtcgagatgttcgtcggcatgggcgcatcgaaagtacgtgacctctttaggcaggcaaaggaaaaagcgccttgcatcgtgttcatcgatgaaatcgacgccatcggtaaaaagcgcgataatcagctgagcacgaatgatgagcgcgagcagaccttaaatcagcttttgaccgaaatggacggttttgagggcaacaacggcgttattatccttgccgcgacgaaccgcccggagtcgcttgaccccgccttgacgcgtccgggtcgttttgaccgccgcgtgccggtggagctgcccgaccttgcgggccgtgaggcgattttgcgtgtacacgcaaagaagattaaggttgcacccgacgttgaccttgcgaagatcgcgcgcatggcttccggcgcttccggcgcagagcttgcgaacattgtgaacgaagctgcgctgcgcgccgtgcgtgacggccgtgcttccgcaacgcaggccgaccttgaggagagtatcgaggttgttattgcgggctatcaaaagaaaaactctattctcacaacgcgcgaaaagctcatcgtttcgtaccacgaaatcggtcacgcgctggtggcggcgaagcagacgaactctgcgccggtgcagaagattacaattattccgcgcacgtccggcgcgctgggctacaccatgcaggtggaggacggcgaccattacctgatgagccgcgaggagattgaaaacaagattgcgacgttcacgggcggcagagccgcggaggaagtcgtgttccattccgttacaacgggtgcatcgaatgacattgagcaggcgacaaagcttgcccgcgcaatgatcacgcgctacggcatgagcgacaactttgatatggtcgcgctggagacggtgacgaaccagtacctcggcggcgatgcttcactggcgtgcagcgccgaaacgcaggcagagatcgacaggcaggtggttgaccttgtgaagaagcagcacgcgaaggcggtgcggattttacaggagaaccgcccgaagctcgacgagcttgcaaagttcctgtacgagaaagagaccatcaccggcgaagagtttatggagatcttgaatcagtaaagaatttatataaaacgaaagcgcacagcttcttttcgaggctgtgcgctttactttttgatatgtgttctttttaagagcttgctttttgcaagctcttcgggagaccccctaattgggtctcccacgagtaaacagtccaccggactgcttaatagcaatgcgaagcattggtttctcccagtcctgattttgggtaagcaaaagggtttcgctttctgcggaaagcgaccaagggcttcacccttggaacctgaccgactttttgaaaaaagttggatcaaaaacttttagacacgctttcacgtaagctttgtgttatttcttgcccgtataatacttcgcaagcccgccttcgccggtttctctgtatttggagaacaaatctctgccggtctcgtacatggtgttgacgacgacgtcgaacgagatttttcttgtataggtgaggaaattcgcaaggctcagcgcgttgatggcgcgcatggcggcgacggcgttgcgttcgatgcacggaatctgcacgagtccgcgcacggggtcgcacgtaaggccgaggtggtgctccatagcgacctcggcagcgtattcaatctggtctaactccatgccgtgcagctccgcaagagccgccgccgccatggaacatgcgctgccgatctccgcctgacagccgcactccgcgccgctgatggaggcgttcgtcttgataagattgccgatgatgccgcccgccgcgagcgcgtggagaatctcggtatccgtaaagccgcggcgttcctgcatatacaaaagaacgctcggcagcacgccgcaggaaccgcacgtgggcgcggtgacgatgatgccgcctgccgcgttttcttcgctgacggcgtaggcataggcgcacacaaggcggttttcgcgcgtttcggcgctttcatcgatgtgattctgacggtagagcattttcgctttgcgctgcacgtctaaaccgccttttaaggtgccttcggtctctaaaccgcgggtgacggcttcgcgcatacagcgccagacttcctttaaatagtcccaaatctccgtgccctcgcactcttccgcatactgccaaaggcgcatgtgacgcgaggcgcagtaagctttgatgtcggcgaatgtggaaagcgggtaaacgtctgcgggagcgtcttccgtttcgccctccgagagaattttaccgccgccgacgctcatgacgcgctcaaagccgatctctttgtcgttttcaatggcggtgagctccagcgtattcgggtgggggagaggcttatccgaaaggtcgaaccgaatttccaccggcagcggtgcaaaggtcttgacgagaatgtcgtccgtcaagtggcctttgcccgttttggcgagcgaaccgtacagagtgacgagaaaacggtctgcctgcgggtatttttctttaaagcggtgcgcggcgcgctccggccccatggtgtgggagctggagggacctgtgccgatgcggtaaagttccttgagtgattccatgtgggggttcctttcagaaagcgaaatgataaaaagagggcttgggaggctcggcgggctgaatgacaccgttgatgatgcagcggccgtcgtggcggaacagcgcatttgcaagctctttttcggttttgatgcggtacgggaacgccatgccggctttgccgatgtttgattcgtgttgttcgtgcgtatcgccgccgctggtgccgtagaggcggttcctttttgcaaaatcatagccgcggctgttgtcttcgtcggagttgccggcgttgtaaatttcggcggcgtccaatagctccggctgcgggagtacgttggggtcgatgtacggcgcacggcggaaaggatgcgcctgcgagatgaatccgcccgcttcgtgcacggcgtcgcaatagtctttgatgggcgcgacgtcgatattcgggtgtgcgagcagaaaatcgagatcgatgccgtaggtgagcacctctttgccggagccgtagtggtgctcaaggccgaacagaatatcgaaatccttatcctttgcccagtcctttacgcgcaggtaggcgttccagtaggcgcggaccttatcctcccacggcagggttttatcaatggcggtgctgccctgcaaaaagtgatttgtaaagcacataccggcgtagccgcggtcataatagaccttggcaatgacctccggcggattgtgtccgcagtggctgcacaggctgtcgtgcacgtgcatctcgtatttatacagcataaggatgccttctttcacttattttttcggctttaatttacggcgctcgccgttcggctctacgatgaccatgttatcaagctgtgtacgcaggtttttgcggtaggctgcgatatattcttcgcgcagggctttgcgctctgcggtctccgcttcggtgaggccctcggtttttgctttctttgcgagggcgttgatgcggtctatcttgctttgttccataagaaattctccttcatgtgggatcagtcaacgtcggaaaccacattgttcgcccaaatgcccgagcgcagcaggatggagccgatgatgaccttgatgatatctgcaaactgcacgagcgcatagatgccgatgatggacagcgctgtgtagcggctgcagaaaaacgcgatgggcagcgggatgagccaagtaaatacgcagtcaaacagaaacgtgatgaacgttttgccgccggagcgaatggtgaagtacgtgacatgcgcaaatgcctgaatgggcagtgctgcgccggcgacgaacagaagctcggttgtaaggcgctgtacctccggcgtggtgttgtaaatgagcgggataaacggcgcggtgatggcgatgagcgcgccaacgccgatgtgcagcacgacggtaaagaacagaagcttattatccgtgcgctttgcttcttcaatctcacccgcgccgagctgctggccgatgataatggaaacggcgttgcccatggcgaacatgatgacgcagaagaggttccatactgtgccggcaatgttcgtggcggcgacgacggtcagaccgcgcgtggagtagctttggctgatcatcgtggtgccgatactccagaagagctcgttaagcatgagcggcgtgccggtgaggaggatctttttcacgacggcaccgggcaaatacaggcttttatataagccctgtgcaaaaataaatgttttttcgcggcggtgggtatgtatgatgagatagattgcttcaatatatcttgcgataacggtggcgatggctgcgccgacgacgccgaggcgtggtgcgccaaagctgccgaaaatgagaatgtagtttaagacaaagtttgtgacgatggcgatgatgctggcggtcatcggggatacggtctcgccggtttcacgcagagtgctggaatagctttgcgagaagctgaacggtatgagaccgatcagcatgacgaacaggtagttcttcgcttcggaaagcgttaagacgaggtcgccgccggattcgctttccgtgaggaacagcgaaatgagcgggttattgaagaacagaagcgcgacgatggcgatgacggccattaaaacgctgaaaatgagcttgaagcgcagcgcatagcgcacgcccttgtggtcgcccttgccgtagaactgcgcgccgaaaatggacgcgcccgcaaggccgccgaagatggtgaggttaaaggcgaacaaaagctgattgacgatggcgacaccgctcatggattcggtgccgaggcggccgaccatgacgttatcgagcaggctgacaaagcttgtgatgccctgctgcacgatcatcgggatgatgaggcggatgaggtttgcgtaaaactcccggtcgccgatgaatttttctttgtattttttgaacataactcctccaaaatatcctaaagcttgattttaaaaaatttatatcatcaaaacagagcttcgcgtgacacggctgcgtgcgcctgttctgttcccaaaagagaaccgtccgtttgacggtttttatcggtcttcgggcggcaaaagctcgcccaaaagcgctgtgtagtctgtgatgcagcggtcgcagagcttttgaagcgctatgcggtcgccttcttccacagcttcgctcaacacgccgatgaccgaaaagccggcggcttttgccgttttggcggcgtagagcgcgtcttcaaacacaacggtctcatgcggggcggcctttaaatcggccgcgcactttaaataaatatccgggtgctctttgcttttgccgatggtggtgcagctttcgatgacggaaatgtacggcgacatatcaaggcgatcgaacgcgggccttaaggacgcaatgtccgatgcggttgcgacggctgcgggaatgtggcgctctgagagcgcttttaaaaacgccgccgcgccggtgatctcgggcacttctttggcgtagccctcgcgggcgagtgcgatgatgccctcatgaatctcctcaacggtgccctcaacatggagtacgtcgtggtaatacttggcgcattgctcaagcgagaggctgtttagggtgcggaacagatcgtcgggtgctgcgatgcccattttttcggcgaacgcgaacgtgagtttattccacatgggtgtgctgtttaaaagcgtaccgtccacatcaaaaatggcggcgcggatcttttcggaatctttgaacatgaaagctcctttcaaaaaggcggacaaaaaaagcccgcccgcgtgcatatacattaggagtataccacgcaggcggaggtatttcaaggatataaggggcgttttacggagcttttcgacacaaaattactccatgccaatgacctttttaatggcgtctatgccgtgttgtacttctttaccgaaggcctctgccatgccctcactgctttcaccgctcgtttccggctcgccgagcagaaggaagaatacgtaatcgccgtcggcgtaaatttcggcggcctctattttgtctttgcttgcggtgaaatcttcatctgcaagcaggcgctgcttataagccgcgagcttctctttgacttcgtccgttttgccttctttgacttttacggcgatgaacgtatccgggtgggccttctgcgcggtgttttcagcgtatacctcttcgtaaagcgagtcgtccatgccgagctctgagcgaatttcatcttcggtcagtttcgtatcggggtaatatttgtcgccataggcttcacgcagggcatcgcggaaggcggaaaggccgagcgcggtctccggcataacggaggtgtcgttcggggattcactcacatccggggaaggcgacgcagactgcgcgggcttttcacttgcggcagatgaggaggacgagctttcggtcgttcggcttgcgcagcccgtgaatgaaagcaccaagagcaaagcaagcagagcgggaaaaattcttttcatatcggatcgatcctttctacaaaaatagcgtgcgcggcggtatgccgcgttacccatagaatgcccgtctttttgcggaataaacgccgaaaacgatgcgttttcttcggtttgccggaaatgattgaaaagttcaagcttttatagtatactgtgaacaaagcggctgaaaacagcacgtttcgcatttggaggtgggaagtatggcgcggcatcaggctgcggaacgggagaaaagcgtctcggttttggcatcgttgcttccgtttttatcggttttatacagtgaatttatttttgcatattttgcgcatatgcccataacgcccgtgaaggtatggatggcgctgggacttggcggcatcgcgctggcgctttcgcgcacgacgccgttaaaagggctgaactttctgcttttaaccgtgtggacggtgggcctttggggctttacgttcgtgcagtttttataccggcagatgttcggcgtctgcatgggactgaaggccggtataaaaggcctggaatttttagccgggcttgtgcagatcatcgggcagaattggcttttttcgcttttgatgattgtggtgccggtgctgcattttacactgacgcgcagccttttaaagagacgcgtgagtgtactgggcaagcttacgggtgcaaactggatggccccgctcggcgcgtggctgctttctgcaatcctgattttcgcgggcgttgtgctcggtctgcgcggcacggcgggcgagccctccgaacggcaactcctaatgacgcgctttgatgcggaggcgtcgttacaatccttcggcgcggcaccggaatttttgctggatgtaaagtacaacgtgctgcacatagcgggtgaagagacggtggaatattaccttgtgcaggacggaaaagaccccgtgcaggtaacgccgactcctgagtcggagaattcctgaaaaaactctgaaattcacccggaagttcttgacccgggtttcagaaaaacgtacaataatagagtaaagtcgaataagtgggtgtgtcccggctttgccgggacacaccacagcaaaatggagatttatgaagcattaccgttagaaaggcggtgccaaaaacgaacacacaaaatccgaacgaacaaaacagaaacacgaatacgccgaacggcgtgaattacacgaacccgctccaaaacgagtttgaaaactccgcgacataccgcgttatccacaaggtgggcgacaaggtgacggagagcgtgaataacctcgatggggagaagatttcccgcgaggtgcagggtgcggtgaacggcgttgtaaacgaagtgaaccgtgtggcggagaccgtaaaccgcaagtttaacacgaacgcgcggacaaattatcagtcgccgcaggggcagaatccggacggtacgtaccactattcctacacgcagacggcgtactcgaattacaagcgcccgaatacaaacccgaatcaggctccgagcagcgcgcccggcggaccgtataatccgccgcgcggcacagcgccgcgaaataccgtttcgcagaacggtgcgcccgtgcagcagccgaaaaaggcgccgcgcaagcaggacatgatcgaaaagtacaagccctcaaacggccgctattggctgacgggcatcgtgtgtatgctgtatgcgctgaacggctcgctttaccgctggcaggacctcatcacgtttgctgtggtgggtgcggcggcgtttttcatcggcggcaaaattttcaagggcaaaaagtattatgtgccggcggaatccgtacagccggagaaaaagcccgagcccgaaaagaagccggagccgaaagcggagccgcagaaaaaggtctccaccggcgatcccgaggtggacaagatcattgaggaaggctacaaatatctgcatgagctgcgcgacgtgaacatccgcatcccggacgaggtgatgacaaagcgcatcgaccgcatggaagtggcttctgccgatatttttgcgtatatcgcggagcaccccgaaaaagcagcggagatccgccggtttatgaactactatctgccgacaacgctgaagcttctgaacagctatgataagctgagccgccagagagtgaagggcgagaacattcaaaagacgatgtttgagattgaaggcatgatggagacgatcgcgggcgcgtttgaaaagcagctggatagcctgtttgatgacgatgcgctggacattgcggcggacatcagcgtgatggaatccattttgaagcaggagggcctttccggcgaagacatgaaaatgccgggccttgacccgaacgacacaagcaaaacacagacaaagtgatttttgaccgtgtgacgcacacggtgaatataaggaggacgaacaacatgagcgacgtgaaattgaccttagagcccgagctggagacccccgcacccggcattcccaccctgacgctggacggcgtggaggaagaaaagcccgtagcccctgagaaaaaagaagaggaacagcccgaagtgcagcttacgcccgaagaacagaaggtcgtagacgactttgcggaaaaaattgacattacaagctctgcgctcgtgatgcagtatggttccggcgcacagaagaaaattgcaaacttctccgacacggcgcttgcaaatgtgcgcacgaaggacctcggtgaagtaggcgatgagatcgcgaaccttgttgtagagctgaaaagctttgatgcgggcgaggaggaaaagggtttcctcggcttctttaaaaagcaggcaaaccgcctcgatggcatgaaggcacgttacgacaaggccgaagtgaacgtgaataagattgcgtcttcccttgagggccaccaggtgcagctgatgaaggacatcgtgatgctcgataagctgtacgaaacgaaccttgcgtaccacaaagagctttccatgtacattctggcgggcaaaaagcgcctgaaaagagagcgcgaaacgacgctggaagagctgaaagcaaaggcacagcgctccggcctgccggaggacgcgcaggcggcaaacgactttgcacagcagtgcgacagctttgaaaagaagctgcatgacctcgagctgacccgcatggtttccgtgcagatgtcgccgcaaattcgtcttgtgcagaacaacgaccgtttgatggcggagaaaattcagtccaccattgtgaacaccattccgctttggaagagccagatggtattggcgcttggcgtggcgcactctgcagatgcggtgcgcgcacagcgtgaagtgaccgatatgacgaacgagctgctgcgcaagaatgcagaaaagctgaagatgagcaccattgagacggcgcgcgaatccgagcgcggcattgttgacatggagacgctgcgccagacaaaccagtcgctcatctcgacactcgatgaagttgtgaaaattcaggaagagggcaagacccgccgccgcgaagcggagcaggagctcggccgtttggaaaacgagctgaagcagaagcttttagacattcgcgcgtaaataaagagaacaccggccgggttgtgcttgcagtgctgcccggctgtgcgtttatagactttaaatttgcttgtcatgaatttgcatgtagacagaaaaagcagaaaggaaatttttatgaaaaagaaaaacgatggcgtaaaagccgtgggccgtgtttcggcggtcattgcgatggtggtgttaattttggcggcgatcccagtcggcgcgtgtatatctttgtcgcgcgagcgcaacaatgtgacggcggaatactacggttccgacgacgtgtacggcgttttggaccaggtctcgatgatggtttccgaagcatcgaatctggtgacgatcgcggaaaaatacagcgagacggatttgacgcttgtagatgccgtgcgtaccgcgcagaacgcggtgaaaaaggccgagcgcccggcggacaagtacgcggctttaaacgacctgacgacggcggtgaaggcgatgtatcgccagatcaagaatatcgacatgaatgaggaggacgcaacgtaccgcgaatcgctgatgtcgaactacaattccgacttggattatctgatgcgcgacgattacaacgataaagccgccgcattcaacgatgcgctgcacaattcgcctgcgtatgcactggcgaagctggtgggcatcggcgacgtggagctgttcgcgtaaaagtttgaaacggacagggaaaggaaatgcttatgacaaagaccgtacatcctgttttgaaaaagacgggcgctgtgctgcttacggtgctggtgctcgtacttatggcggtgccggcgtttgccgtgacgttgccggatgccccgacgggctatgtgtatgacggcgcgaatgtgctttcgccctcgacggaaagctatattgagcgcacgggcagcgcacttgccgaagcctgcggcgcggaggtcgtggtggcgaccgtggatttcaccgacggcgaggacattgccgattatgcgtatgacctctttaacaagtggggcatcggtgacaagaaagcgaataacggtctcttgattctgctttccatcggtgcggaggattactacgccgagccgggcgcggggctgaccgatgtttttaccggcggcgtgctggacgcgatgctgtatgactaccttgaggacgattttgccgcgaaagattacgacagcggcgtgaaaaaggtctacgcccgcgcggtggagattttggaagaccactacaatgtctcgtatttcacgggtacaacaaacaacgcgaatgcgaacactaattataattatgcgaataataatacatccggcggaattttatacggattccagcgcttcttctcgcgggtctggcggttcttctttgtggttctgtttgtcattttgattattgcgctgagcgtgctgcgtccgcgcagacggtattaccgcagaggttggggtgcaccgcccccgccgcctccgatgggcggcttctggcgcggacctcgtccgccgcgcggcccgggtggtcccggattcggcggcccgaggccgggtggatttagcggctcgcgtccctcgggcggtccccgtcccggtggcggacgctccggcggctttggcagcggccgttcgggcggcggtgcgccgcgcgcaggcggaggctccacgcatggcggaggtgcaggcagaagaagatgagtatttgggttttgtttgatttagacggcacccttgtcgataacagcgagggcatcacgaaaagcacgcagtttgcgctcgacagctacggctatccgaaccagccgatggagacactgaaaaagttcatcggcccgccgctgcatgaatcctttatggaattttacggcttttccaaagagcaggcgtttgaggcggtagaccgctaccgcgtgcgctacaaagaaaaaggcgtgtacgaaaaccgcttgtaccccggcatgaaagaactgttggaggcgctgaaaagcgcaggtgtgaaattgagtgtttccacctcaaagccgacagtgttcacggagaagatcttgaagcaaaacgggatctttgagctgttcgaccagattgtcggcgcgaatctcgatggctccatgacggataagaccgaagtgatgcaggaggccatgcgccgcgcgggcggaaaagaaaacaatacgtttttcatggtcggcgaccgaagctttgatatgatcggcgcgaaaaattgcggcgtgccgggcattggcgtgtacttcggctttgcggaacccggcgagctggaaaaagcgggcgcggattacaccgtggagaccacggaagaactgaaaacattgctgatgaagcttgtgacggaagccgagaattgaaatctgttgacactccgttcgctttttgatagagtgtagttaagaagaataaaatgactttgcggggagggaaagccgcttgatctgcatgagctttccgtcctccggcaacgcggaaagagaaagtgagatgccggaatatgtcgtcacggtgatgagctcgccgcggacggtgacggttcccgtttgggtggttataccggcgggtctggtgattgctttaatcgtagtttttgtaagaaaaaagcgcgcagcttgagggctgtgcgctttaatactatgttccattttgaagaactcgcgtggcgagttcttcaagaaaccccttgatagggtttcttgcggcggaaacgtccactggaagtttccgcctatcttcctgatctatggtaggcaaaagggtttcgttttctgcggaaagcgacttggggcgttgccccaagaccccacgacctttttggaaaaaggtcgatcaaaaacctttaaccacggttgccggaagctttaggtttcgctttccatacccggaaacgcgcgctcggggtggatggctttatacgccgggcggatgattttaccggcattgatgagctcttcgatgcggtgggcgctccagccggcaattctggcgcaggcgaagatgggcgtatagagctccatcggcaaatcgagcatgctgtaaatgaatccgctgtaaaagtctacgtttgcggagacacctttatagatgcggcgcttttcggcgatgacctgcggcgcgagccgtgcgacgcgcatgtatagtccgtactcgtcctcacggcctttttctttggaaaggccctctgcaaagcgctccatgatgcgtgctctggggtcggagacggaatacacggcgtggcccatgccgtagatgagcccggcgttatcgaacgcttttttatcaagcaggcgggtgaggtaatcgcagatttcattctcgttcgtccagtctttgacctgctccttcatgtcacgaaacatgcgtacgaccttgatgttcgcgccgccgtgctttgggccttttaaagagccgagtgccgcggcaatggcggaatacgtatccgtgccggaggacgacacgacatgtgttgtgaacgtggagttgttgccgccgccgtgctctgcgtgcagcataagcgcgatgtcgagcaccttggcttccagcggggtgaactgtttatcggaacgcagaatacgcagaatattttcggcggtggtaagctccggcttcggctggtgaatgtaaagacttttgccgtcgtgatagtggcggtacgcctgatagccgtagacggaaagaagcggaaaaatggcgatgagctgaatgcactgacgcagcacgttcgggatggagatgtcatctggggcgtcgtcataggaatacatcgtcagcacgctgcgggcgagggtgttcatcatgtcgccgctcggcgctttcatgatgatgtcgcgcacgaaatttgtgggtaatgtgcggtagaacgaaagctgtttgatgaacccgtcaagctgttctttattcggcagttcgccgaaaaggagcaggtaggcggtcacttcaaagccgaagctgtggtcgctcggcatgctgcggacaagatcttcaatgctgtaaccgcggtagaaaagctgcccttcgcagggaattttcacgccgttttccatgcggctggagcggatctccgaaatatcggtaaggccggtcagaacgccgttgccgttaatgtcgcgcaggccgcgctttacgtcatattttgcatagagctccgggtcaatcttaccgtttttcacgcaaagattggcgagggcttccatttcgggggtgatttctgagtatacggatcttgccatgcagtccatcctttcttcgtttcccgtttggggttctgcgagtttttttaaaatcgttcaaaactaggaatgatatattttattatagcatattggtgctgtgtgaaaatgtcgaatttgtgaattttccgcgtcagaaccgtgtacatgtgcataattttgtatgccgtatcataagcatgataagacggatatgccacacaaatggaggcagtgcgatgcgaaaggaacggatcggaaaaatcggatacagaatttgcgcggtgctggcggcggccgtgtcgctttggtgcatgggggataatttatggccggttgtaaaggaaaacggcgcggcgtgggcgcttagggcggcgggcttacaggcggcaacaagccaagaagtgccgcaagcggaagcatcgcctgcgccccaaaaagagaccgtaaaagaaacggagccggaagcaacatcgctccccacggcgacacctgtgcccgtacaggaggaaacagacacggagctgcccgtgctgccggcgccgacacctgacccggagcgtgaaacggcagcggtcgccgcgacctttatgggcggaggagaagagataaacggcttttttgtgaaggatacttcggactcggggcttgatttatcggaagaaattttaattgaccccgatgtgcacgtgaagcgcgacggttcgccggtggtgctgttttactccacgcatacgtcagaagcgtacttgcagtatgaatcggactggtattaccgcgatgagagttttcgcacggaggaagaagaaaaaagcgttgtggcggtggcaaaaagggcgaaagacgtgatagaagcgggcgggttcggcgtgatccacgacacgacaaggtttgacgagacgtattccggcagctaccagcgctcaatggatgcgatgcaggaaaatttgctgaaataccccacgatacagatcaccgtggatgtgcacagagacgcgttcggtgaggaggacgacggcacacggtataagcccgtggcggaggtaaacggggagaatgccgcgcagatcatgattatggcggggtgtgacctttcggaagacccgctgttcccggattggcgggaaaacttgcatttggccttgcgcttgcagcaaaaaggcgatttattatatccggggctgtttcgaccgctgtttttcgcgcagagaaactacaatatgcacgccacgcacggctcgcttttggtggaggtcggcacagaggtgaatacgcaaagggaggcggactacgccggggagctgctgggcgagacgattctggcggttttaaacgacatagcggaggaatagcggaaaacggacggggcatactgcatgcggaggtgttttgcatgcgcaaatgtgtgtgttcccgcgcgtttttgatgtcgtttttctgcaccgtgctggtgctgctgtttgtgtttggtatgctgatggtggacgccgaaggaagacggttgagctttaatgacaacgccccgccggcggaaatgctgtatcaggcggacggtaaggcatttttgaaaatcaacgcgtttgagctggatgcgaaaatccccgtgaccggggcagtgaaggtgtggcggttctttgaaaagttcttttgtttgccgcagagttctaacggcgagcatggttaaaagtctttagtcaagttttcttcgagaaaacttgaaagcgaacataagcgttcgcttggattcatcaaggcagagccttgagtcgccattcgcaaatgacgaaatccttttgcctacccaaagatcaggaaaatagaaaaatcgtccggtggacgatttttcgtaagaaaccctatcaaggggtttcttaaaaggcggcgttgccgcctttagaaaaaataatccatgcgaaatttaaatttaaaccgttctttttttaaccaaattaaaattgttcgtgattttttaacaaatatatagtatagttgttagaaagagaacgcgggcggatgaatgcgcgattttgatgcccaaaatgaaaaagaggtagaatttgcatggcaaaaaaacagtttaaagcggagtctaaaagacttcttgatctcatgatcaactctatttatacccataaggagatttttctgcgcgagctgatctccaacgcgagtgacgcgatcgataagctttactataaatccctggcggacggcgctacgggactcaatcgtgacgacttccagatcttccttgcggcggataaggacagccgcacgctgcgtatccgcgataacggcatcggcatgacgcaggaggagcttgaccagaacctcggcgtcatcgcaaagagcggctcgctgaaattcaagtctgaaaacgaaaagaacgaggatatcgacatcatcggtcagttcggcgtgggtttctattccgcgtttatggtcagcgaccacgtgcgcgtggaatccaaggcgtacggcgcagagcaggcgtattgctgggagtccgacggcgcggacggctataccatccgcgagtgcgaaaaggccgatcacggcaccgagattattttgcatatcaaagaggacaccgaggaagaaaagtacagcgagttcctcgatacataccgcattcgttcgctcgtgaagaagtattccgattatatccgctaccccatccgcatggaggtcgaaaagacccgtgcgaaggagggtacggagaacgaatatgagcactattttgaggtggagaccctcaacagtatggtgccgctgtggaagaagaataaaaacgagatcactgcagaagaatacaacagcttctataaggagaagttctacgattggcaggacccgctgaaggttatccatacctccgcagagggtacagcgacgtataacgcactgctgtttatccctgtaaaagcgccgatggattattattcgagagactacgaaaagggtttgcagctgtatgcttccggcgtgctcattatggaaaagtgcgcagacctgctgccggattacttcggctttgtgaagggccttgtcgattcgcaggatctgtcgctgaatatctcccgtgaaatgctgcagcacgaccgtcagttaaaacttatcgcgacgcgcattgagaagaagattgcgtcggagcttaaatccatgctggagcacgacagagagaactacgagaagttctttgaaagtttcggtttgagactcaaattcggcatgtacgagaactacggcatcaataaggataagctcaaggatcttgtgctgttccgctcctccacaggcaagatgcgcacgctgaaagagtacgttcaggacatgaaggaagaccagacctgcatttactacgcggcgggcgagaccccggagcgcattgcgcatctgccgcagaccgaagccgtgcttgaccgcggctacgaggtgctgtaccttacggacgatgtggacgagttcgcgctgatggtgttgcaggagtacgaaggcaagagcttcaagaacgttgcggcggaagacgcacgcgtgcagaccgaagaagaaaagcaggctgccgaaaagcaggcggaggaaaacaaggctctgcttgagaagatgaagacgattctcggcgagcgtgtaaaggacgtgcgtgtttcgacgacacttaaaaatcaccccgtgtgcatcacgacggacggcgcgatctccatggagatggagaaggtgctaaactccatgccgggcgcggagcagaaggtgaaagccgagcagatatttgagctcaacaccgaacacccggtgtttgaggtgctgcgccgctttgaaaacgacgaagacaagctgaaaaagtacactgaagtgctgtacgatcaggcgctgcttattgagggccgctccattgaagacccggtcgcttacgcaaacaacgtcgcagagctgcttgcacagtaaaaaatatccccattaggaggacgggctatgaagccgaaaagaaaacgggactttaccggcatgttcatcatggcggtgttgctgagctttattctgccgcttggctaccttgtagtacgtattgtgtcgcacggcggcgggacggaggaagtgcgcagccgcgaagactatgtgctgatgcttttgcagtgccttttgggcattgtcgccattgtgctgccgctgcggctcatccggcagaaaacgctgtagattccgcgcgtgatgctggttttgtacattgcgtttttgtactgcgcgatcttcctcggcgaggtgcgaagcttttactacgccgtaccgcagtgggacacgattctgcacacgatgagcggcgcaatgctgggcgcgcttggcttttccatgattgcgattttcaacaatgcggagcgcataccgttgaatctttcaccggtgttcatcgccgtatttgcgttttgctttgcgcttgcgatgggcgcggtgtgggaaatttatgaattcacgatggattccgttttcggcactaacatgcagaaatatatgctggataacggcacggcgcttattgggcaggcagccttgcaggacacgatgaaggacatcatcgtggacgccatcggcgcactggtgatgagcaccatcggctacatttccctcaagtacaaaaagggctgggtggaaaagctgatgatccgttttcacgtgaaaaagcccgaaaaaaacgggaaaaccaaaaagggaaaggatgaatgagcatgaacgataaccggaactacacgcccgctgggcagccggtgacgcagccgctttataacgggcagccggtgtataccgcgccgcagaatcccgcgccggtgcagaacccgacgccggcgtatacatatccgccgcagggcgggaacggcgcgcccgtttatgcacagccggtgcagcagcctgtatattacgcacccgtacagccgccgaagtgggcggaccccgcgcgtttggagcaaaaggagctgcgccgcgcggcctcccgcctttcgtttgcgaccatgacctctttgccgatacaggttttgtggacgacgcttgcaacgctgattttaacggtgtgcggcgtgaattttatggggccgaacaccattggcgactttccgccgacggcgtattaccttatttcgtccattgcatcgttcttatccattgtgctgccgttctcgttttttctgttctttgggaaaagaaagctctcggacacggtgcttgtggagaaaaacggtgtgctgaacagtgttttgctcgtctttgcgggccttgccgtcagtgttttgatgaacattcccgcaaacctcatctcgcagcttttggagggcgcggggctgaacggcgacgcaaacacggcagaccttttggcgctgacgcctgtgcaggcgttgacgatgttcgtttcggtcgtgctcgtcgcgccggtgacggaggaatttgcgtttcgcagcgtgacgacggccgtcatgcgccgctggggtgactggcctgcggtgatcttctccgcactgatcttcggcatggcgcattacagcattcagtccttgcccgtggtgcttatggcgggctttgtaatggcgcttttgtatgtgcgtacccgcaacatttgggtgaacattttcgtgcacatgctcaataatctgcttgcgacgctgcccatcgcccttgaggggcttgtgggcgcggatgcggcgaatatcgcgagcaatttgctgacgtatatcgtgtacggcttggggctgattgcgcttgtggtgctgcttatccgcaatttcaccggtcataaggtgttccgcacgcccatgcagcgcggcgtaccggtacgcggaaaggcgttgtggatgttcgtgaatcccggtttcatctgctactatgtgctgtttgttgtaatgtgtatcgtgacgctgtattcgtaaggggacatatgccgtataatgccatgaaaaaccgcgcgtttgtgccggaggaaaagttcatgcgcgaggcgctttcgcttgcggaagaagccttttcggcaggtgaagtgccggtgggcgccgttgttgtgaaggacggcaaagtcatcgggcgtgggcggaatcggcgagaagagcatcagagtgtgcttggccatgcggagctggaagcgatggaacaggcggcaaaagtgctcggctcctggcggttgaccggctgtacgctgtatgtgacgctggagccgtgtcccatgtgtgcgggcgcgacggtaaacgcccgcgtggaccgcattgtgttcggcacggaagacgaagctatgggtgcgtgcggcacggctgtgtcggtgacgtcgctcaaaaatgcctttaaacccgaattataccgaggattgctgtgtgaagaatgcacggcaatcctgcgccggttcttcaaagccagacgcgcggaacgaaccgaaaaataaaagacccgcattgcaaacggaatttccggctgcaatgcgggtttttgcgtatgattttaaaattatgtaaactaaaactccgggatgatggagcggacgagggggcggaggccggtgccggggttctcctgctggtggtagatctgcccgtcgtaggcggggaggttgttgccttccaccaaaacgggaccggtgggggtgatgcccacgtcccagccgacgtaccgcatgtcggggcggatcttcgcggcttttttgcacagcgcaatcgcttcatcaaaatatggcacgcggaagtttatgaatggcgtgcaggtatcggggtgcatgtcgaaatacatgccggttttatcggacatagcggggcggcggatgacaccgtcgtcgcagatgagcgcgttgagcccgccgcttgtggtgttatctacaaatgagccgtggcggcccgtgcgcacaaagctgtacagcacatgcacgtcgcctttgtcatctgttaaggtgcagacgcgcagggtgttgagcgaatacggatacagcgcgctcatttccgggtgctgttgtaaggcttcctccacgagcagtaagccgttttgcacccagttttcgcgcagccttttcacggcctctcggtcgtttaaatcggtcccggcgctgtcaaagcgtttgacccccagaccgccgaagctttccggctcttttaaaaacaccacggggtggtggcgcagaaaatcggcaagcgcgtcctcaccggcttcattgaggtctaaaaatgaccgtccgaggtacggcgcaaacgtgcggcagaacagcagcttgttttcaaaataggggcggtcttcagggctgtttaccatgcgggtcaagcgccagttatcctgcatggtgaagaatgtgtttctcgcctttgcgccgtggatgtgcgcaaaaccgaaaatgtggtaatcgtaaaatcccacgttataccgcaaaatgcagtacagcatatccgccatgatgacgggtgtgggcgttttggtctcctttttgacgtcgcgaacatacaccatcatgcgctttgcgtcaaaaccgcgaatgcggcgcagtaaaagctccagcttcagcatttcttaaaaactccttacgaaattcttacaattttaaataaaatacaagaatgatttttgttgattttattatagcataaacctgtttaaaaggaaagaaaaagatttgcaaataatattagcaaatgcttttgcaaagcgaaaccccgctgcgttaaacagcggggcgcaattaggaacgatttatgaattatggaattttatgcttcttcggactcttcctttttcggggacacagtgatgcgcacgcgggtggcacgctggtactctgtttcttctacaacgacatgcaggttttcaaaatcaaagcagtcgcccttttcggggatgcgatcgagctgctcgatgacccaaccgttgatggtggaggcttcggaatcggacttcaaatggaagtattcaagaaggtcgtcaaggttggtggagcaatcgacaaggtattcgttgtcgctgaccttttgaaacgcttccactacttcgtcgtgttcgtcccagatctcgccgacaagctcttcgatgatgtcttccagcgtgacgatgccctcggtgccgccgaactcatccacgatgacggcaaggtgcgatttgttctgctgcaaaagctttaaaagcgcggaaattttcatcgaaggcgggatgaactccacgggcttgatgatctgcttcaccgcgttgccgtcgcgcagcacgaggttatgaaaatctttctcattgataatgccgacgatgctgtcaatcgtctcctcatacaccggcaggcgcgaaaagcctgtttccgtaaagaggtcggcgacttcctgcacggtgctcgtcttatccacggcttccacgtctacgcgcggcgtcatgatatcgatggcttcaaggtcgtcgaactcaatgacgttgtggataagctcgctttcgttttcattgataccgccgtcgtgctcggcttcctccacgatggtgagcagttcgctttccgaaatggtacgatcgttagagacctttacgaattttttcaccagctttttgatgcccacaagacatacgttaatgggcttgaagacgtaaatgagcacgttgatgatgggcgcggaaaacatagcgaacgcttccggggactcttttgcgatgcttttcggcgtgacctcgccgaaaatgagcacgatgatcgtcatggcgatggtggaaacggtgggaccgttgtcgccgaatgctttgataaacaaaacggtggcgagagaagacgcactgatgttgacgatgttgtttcccaccagaacggaagagatgagctcgtcgtaattatccacgagcttataggcgagctttgcgcgcttgttgccgttatcggtcaagtttttgagccggatacggttgagcgacgaaaacgccgtttccgtggcggagaaataggcggacaaaacgatcagaacgatcaacgctatgatcaaccctgtactgtgactgtccatctgagaaaaaataacctgtctttcctacaaaaaatttgccgcagccatatgccgcttggcatgtatgataatatcgtatattaccacaatacgcgaaaaaaagcaaatcgaaaacctgtaaattttttgaaaacgcaaaaagcgcaggagcttttcaaaacttccgcgcctttttacagagctttatgaaatttgtgcacgctctttcggcaaaaacgtgagctttacgcgcgccgagccgttttcgttcggatagtaataaaggtaaagcagcgactcgtttttaccgagaccgcgccactggtattgtaaggcgcagacattttcgccgcctgcatctttttgcagcgccgcaaaaagcgtatcggtatcgtcttcggcggaaacgccgtccatgttcacgtcggtcgtgaacggtccgccgagcgctttttcaagctcatcatagcaggtgcgcatgtatgaaaagccgtcatcattcggcgtgcacggtacggtgagctctgcgtagttgagcttgccggcggaggtttcatcgccgcggtatgcatcaaacgagagctgcacatcggcggttttgccgtaaacgtcaacggtataatcggagagcgcctgttcggtagtaccgagcgttttcagcgcatcggttttcccctgtcccacagagccgataaacgtttcggggaatgaggctttcgagccggttgagcacccgacaaggcatgtaaacatcgccaaaaggcagaacatgatcgcaaattgctttttcattgtcttaaccactcacttgttatgattaaatattattgagattatgaaaatatatagtggtcatataattgccgtccaccaacatttacatagaggattacttccataccaccatttgcattgatgggaacaatatattgatttgtgggcatttcgtcggttttcgaatacattgtattttttgaaggagcatatcgagtaaaatcaattactttgtgctgatcttcttttagaagtttataggaagatgagcttttttgatataaatcaccatatccgctaaaccagaggcgaatagaactgggtgccgttccagcatcagctttgtatgtgaaatatgagccaatcatgtggtaataccaacgatccgaaatttcaaggttatacacgcatgtataactaactttaattccctcttgattgaacggctgtgtgtatccgtccacgggttgaataggaggatttaaaagttcggcgacggaattgtttttgaaagaattaccatcttcgtcagttgaaatttcaaagacactggttaatgtttttttggtgccttctgtgttttgaatacggagagcggatgaattgctatcttgttcaatccagatgacagagtcatctttgatttcgacatcacaatcttcaatgaatttgtaaatagattcaggtaaggtttgagcggaaaatgtttgaactttttctagagacgccgaagtggagaaagtgggttcgcttgcatatacgaatacgctagataaaagcaaaagcatagaaatgactgttgagaccaatttcttcatgagaaactcctttcatctaaataaactttagaataaattgcaaataattacacagcatttttaatactcaaatgtacaaatacgcattagagtttgtaaggcgaaatttaaagaagactttaaatgtgcatcggaagcacctcaatttaaaataagttatttgtacaagtcaacattaacatatatacagctaaatgtcaatattatttagaataagtattagaaattttcgagttcagaaatgcaaggaattcaccattgattgataaatattgattgttttcttctttgttttctgtataatagaaagtgggaaacaacaaactgcggcggaaaacgctgcggctttgaaacgatagatcagaaatgaaaaaaggagaaccttatgaattatacggaaaacgtaatcgtgccggagcgcacgcttttggtctcgctggacacgggcgagtatgacgcggaggaatcgctgcgcgagctgtgggagcttgcaaaaagcggcggcgcggagcctattgcgacaatgatgcagaagcgcccctccccggagaccgcgacgtgcgtaggcagcggcatggtggaggaaattcggaatttctgcgagaacaacgagattgagctgattatttttgaccgcgagctgacgccgacgcagatccgcaaccttgaaaatgcgacggacgtgcgcgttgtggaccgcacgatgctgatcctcgatatttttgcgcagcgtgcgcagagccgcgcaggtaaggtgcaggttgaagcggcgcagttaaagtatcttctgccgcgtctgaccggcaaaggcacggcgctttcgcgtctcggcggcggcatcggcacgcgcggcccgggcgaaacgaagctggagaccgaccgccgacacattcgccgcagaattgaagcgctgcgcgaacagttgaagaaaattgaagtcggccgccacgagacgcagcgccgccgcgaaaaggacggcacggtgacggtggcgcttgtcggctacacgaacgcgggcaaatcgactttgatgaatctcttgacgcaagcgggcgttttggcggaggataagcttttcgcgacgctggatcccacggcgcgcgcgttgaagctgcccggcggcaagaccgttatgctcatcgatacggtcggccttgtgcgccgcttgccgcaccatttggtggaggcgtttcgctccacgttggagcaggctgcaacggcggacatcattttgaacgtgtgcgatgcttccagccccgaagcacgcacgcacttggacgtgacaaatgaaattttgcagagcctcggctgcggtgaccgcccggttatcccggtgctcaataaatgggatcttgtgggcgatgcggacagcgctttgcatttgacgggcgcggtgcgcatcagtgcgctgaaaaacgaaggcatcccggcgcttttgcaggcgattgaagataacctgccggtgaagccggtggacgtgacggcgctgctgccgtttgcaaagacgggcattgcggcacagctgagaaaagcgggcgcgctcgtctccgaagaatacgtgccggaagggctccttattcatgcccgtgtggagccgcgcgaaatggcgctgataaagccctatatcgtagaaaacaattccgaaagcgaaaatgtataaagcagtgtatacaaatgtataatatgcgctttattcattcgaaaatgcatacttttgaagattgaattttgaaaaatacacaaatataaagccgaaaaacccgcatgaaatctgggagtttctacaactttcaaaaaagatgaataaatattcaagaaaagggttgatttttccggaaaacggtgtataataatgaccgttgaaacaaataattctccgccgcacgatgacggcggtttatgaaaaaaggaagggttacatcatggcaaaggcaaagaaggatattaaaaaggtcgttctggcgtactccggtggtctggatacctccatcatcatcccgtggctgaaggaaaactacaacaactgcgaggtcatcgcggtttccgccgacgtgggtcagggcacggagcttgacggtctggaagaaaaagcactgaagaccggtgcatcgaagctctacattgaagacctcaaggaagaattcattcaggaatatgtttatcccaccgtacaggcaggtgcggtctacgagaacaagtacctgctcggcacgtcctttgcccgcccgatcatcgcaaagcgtatcgttgaaattgccaaggccgagggcgcagacgccatctgccacggctgcaccggcaagggcaacgatcaggtccgtttcgagctgaccattaaggcgtttgctcccgaaatgaccatcatcgctccgtggagagagtggagcatcaaatcgagagaagaagaaatcgagtatgcggaagcacacaacattccgctgaagatcaaccgtgaaacaaactactccaaggataagaacatctggcatctgtcccatgagggtcttgaccttgaagatccggcaaacgagccgcagtacaaccacccgggcttccttgagctcggcgtttccccggagcaggccccggacgagcccacttatgtgacgattcattttgaaaagggcaagccgaccgccatcaacggcaagaaaatgaacggtgtggaagttgtaacgacgcttaacgagctcggcggcaagaacggcgtaggccttgcggatatcgtagagaacagacttgtcggcatgaagagccgcggcgtttatgagactccgggcggtgcaatcctttaccacgcacacaataagcttgaagagctgtgcctggacagagacacgttccactacaagcagcagatcggtttgaagtttgcggaacttgtttactacggccagtggtttaccccgctgcgcgaggcgctttccgcatttgtagattccacccagcagaccgtcaccggcgatgtcaagctgaagctttataagggcaacatcattgatgcaggtgtcacttctccgtacagcctgtatgacccggagatcgcaacgttcgatgaggatgaggtctacaatcaggcggatgcagacggcttcatcaacctgttcggcctgccgatcaaggtttatgcacacatgaaggcaaagaccgaaaataaataatccaaaagtagatttagggtaggcattcatctgcctgcccttttctgccataaacgggaaggaaagattcagccatgaaattatggaaaggccgcttccagaaggaggcagacccgaagacgaacgactttaactcgtctatttctattgacagccgcatgtacaaagaggacattgagggcagcattgcgcatgccacaatgctcggcgcggcgggaatcatcgataaaggcgaaagcgaaaagatctgcgcggagcttgagaaaatcgaaaaggacatcgagacgggcgctctgcacattgaccccgatgccgaagatattcacacgtttatcgagggcgagctgacggcgcgcatcggcgacgcaggcaagagattacataccgcccgcagccgcaacgatcaggttgcgctggatgttcgtctgacgctgcgcaaggagtgcgcggggctcatggaacagttaaaagagctcatcaacgtactgtgcgaccaggcggaggaatatgccgacaccgttatgccgggctacacgcatttgcagcgcgcacagcccatcacgttcgggcatcatttaatggcgtatgccgaaatgttcctgcgcgacatcggccgtatgcaggacgcgttaaagcgtatggacgtttgcccgctcggctccggcgctttggccggaacgacgtacccgctcgaccgtgatttgacggcgaagctgctcggcttctccggcgtgagccgcaacagcctcgacggcgttgccgaccgcgatttctgcgcggaaatcgccgcggcgatttcgcttgcgatggtgcatctttcgagattttccgaggagatcattctttggtgctcgtgggagtttaaattcatcgagctggacgacgcgttttccaccggctccagcatcatgccgcagaagaagaacccggatattacggagcttatccgcggcaagagcggccgcgtgttcggcgacctgatggcgcttttgaccatgatgaagggtctgccgctcgcgtacaacaaggacatgcaggaggacaaggaagccgtgtttgacgcggtggataccctgcgcctgtgcctgacgccgtttatcccgatgctgaaaacaatgcgcgttttaaaagagaacatgcgcgccgcagcggcaaagggcttcatcaatgcaacggattgcgcggattatctggtggcttcaaagggcctgccgttccgcgatgcgtataagattacgggcgagcttgtcgccttgtgcatcgagcgcggcctgacgctggagacgctgccgatcgacgaatacaaaaaggtctgtaatgcgttcgacgagggcgtgtacgaggccatcaaccttgaaaaatgcgtgcgcgaccgcaaggtcaagggtgcgccgtgcccggagaacgtccgcgcggcggcaaaagaagtgcgcacgatcgtaaacgggctataaattcaattttacctttgttgggggtatcaaaatggaaaagattaaggtcggcgtcgtgggcgccaccggttatgcgggcgcggagatctgccgcctgattgcggggcatcccgcagcggagcttgcggccatcagctctgtaagctttgagggacaggctttgtcggacgtttacccggcataccgcgaaatgtgcgacctcatctgcaccacgcaggaagcggttgtggaaaaaagcgatgtcatctttgccgctttgccgcacggcctttcgcaggagcttgctgcggagtgtgacaaaaaaggcaaggcgttcatcgacctcggcgcggacttccgcttaaagagcgaggaagaatacaccgagtggtacggcggcacatttacggataaggcgctgcacgaaaaagccgtgtacggtctgccggagctgttccgcgaggaaattaagaagacaaagctcgttgcaaacccgggctgctacaccacggcggtgccgcttgcacttgtgccggcactggaaaagggctatatcgagacgaccggtatcatcgcaaactgcgcgtccggcgtgaccggcgcgggcagaaagccggcgcagaacagccactacccggagctgaatgaggggatgtccgcgtataaagtcgcgtgccaccgccatacgccggaaatcgaacagacgctttccaaaatttcgggtgagaaaatgcacatcacgttcgtgccgcatctgctgccggtgaaccgcggcattttagcgacatgctatgcaaaactcaagccgggcgttacggaggaaatgcttcgcgcggcgtatgaggaaagatacggcaaagagccgtttgtgcgtttgctgccaaagggcaagagcgccgatattcacaacatcaagtacacgaatttctgcgatgtgtccatttttacggacctgcgcaccggcacgttcatcgccatcagcgctatcgataacatggtgaagggcgcggcagggcaggccattcagaacatgaacattctgttcggtctggacgagacctgcggcttaaagctcgttccgccggcattctaaaagagtacgaaattaagggaaagcgatttttatataaggagcaattcagtatgcagtttatcgaaggcggcgtcaccgcggccaagggctttttagccggcggcatccactgcggcatccgtaaaaataagtccaaagccgatctggctatgattttcagcaaaacaccgtgtgcggcggcaggcgtttacacgcagaaccttgtaaagggtgcgccgattcttgtcacgcgcaaaaatattgcggacggccgcgcacaggcggtcatctgcaacagcggcaacgccaacacctgcaacgcagacggcgaaaagaaagcgtggcgcatgtgcgaaatcgcgggcgaagcgctcggcattgacccgcacgatgtcatcgtcgcgtctacgggcgttatcgggcagattttgccgatcgcgccgattgagaatgcagccccggcgttggcggcactgctgaacgaaaacggctccaacatggcggcaaaggccatcatgacgaccgacaccatcgaaaaagagtgcgccgtaaagattacgctcggcgacaaagaagtgcgcatcggcggcatctccaagggctccggcatgatccacccgaatatggcgacgatgctgtgctttgtcacgacggactgcgccatttccgtgccgatgctgcaaaaggccattaaggcggcggcagacaccacattcaacatgatcagcgtggacggcgatacctccacgaacgacacgcttgccattatggcgaacggcgaggcggaaaacgaggagatcaccgaagaaaacgaagcgtacaagacgtttcttgaggcgctgacggcggtttgcagaaagctttccatgatgatggcgggcgacggcgagggcgcaacaaagctgctcatctgcaagacgaccggcgcgaaggactgggagacggcgaagacggttgcaaagtccgtcatctgctcctctctgctcaaggctgccatgttcggcgaagacgccaactggggccgcgtgctgtgcgccatcggttatgccggcgcggatatcgacatcaacaaggtggacgtgtcctttaagagcgcgtacgggcaggtagatgtctgcgtgaacggtgcgggcatcaacttcagcgaggaagaagccgcaaaggtgctgcatgaaaaggaaattaccattctggtggagctcaacagcggcgacgcggaggcggaagccttcggctgcgacctcacctatgactatgtgaaaatcaacggagattacagaacatgagtgaagaaaagaagatcggcatctcgaacagcgaccgcgcccatgtgctcgtgcaggcgatgccgtatatcaaaaggtgggcgggcgagaccatcgtcgtcaaatacggcggcaatgctatgattaacccggagctgaaagaagccgtgatgaacgatattgtgctgatgcagctcgtcggcgtgaatgtcgtgctggtgcacggcggcggcccggagatcagcggcatgctgaaaaagatcggcaaggaaagccgctttgtcggcggtatgcgctataccgacgcggagacgatggacattgtgcagcaggtgctggcaggcaaagtcaataaagacctcgtacagcttttggaaaacaccggcggcaaggcggtcggcctgtgcggccttgacggctccatgctgaaggcggataagctgcccgcagccgaagacctcggctttgtgggcgagatccgcgaagtgaacacgaagatcgttgaagatgccattgcttccggctacacacccgttatctccacggtggcggcaggctaccacggtgaggtgtacaacatcaacgccgatgtggcggcggcgcgcattgcggcggaactcggcgcgcgcaagctcattttgatgaccgatattgtcggtctgctgcgggataaggacgacgaaaacacgcttatcccggtcgtaaacgtcagcgacgtgccgaagctgaagcgcgacggcatcatcagcggcggcatgattccgaagattgactgctgcgtggaggctgtgcgccgcggcgtagagcgcgcgcatatcatcgacggcagaacaccgcactccattctggtcgagctcttcaccgatgaaggcatcggcacgatgttctattaagagggaaaaccgcgcccgtacccgtgaacgaaaacggcgaatgggagaagcactggggttcgtcggcgatagtatcggtgtggaagacaagtacggatatgttttcaacagggtacagacgatattgtggaaacaaaaggaattttgaatatgagttttgaagcaattaaaaagcaggaacaggagtatatcctccattcctacggccgtgtggacgtggcgctcagccacggcaaaaacgccgaggcttgggacgtggaaggcaagcattactatgattttacctccggcatcggcgtgaatgcgctgggttacagcgatgagggctgggtgaaggccgtcaccgagcaggcgggcaagatccagcacatgtcgaactactattactgcgacaaaaacacgcagcttgcggagctgcttgcaaaaaacagcggcctttgccgttcgttcttctgcaacagcggcgcggaggcaaacgagtgcgccattaagatcgcccgtaagtacggcgaaaagaagcacgcgtataaggttatcacactggaaaattccttccacggcagaacgctcaccacactggcagcaacgggtcaggacggctttcatcagcttttcaccccgctgaccgagggctttgtgtacgcaaagggcaacgacgtggaagacctgaaagcgaagctcgctgaccccgaggtctgcgccgtgctgcttgaaagcgtgcagggcgaaggcggcgtggtgccgatggaggaagactatttgaaggccgtgcgcgagctgtgcacggagcatgacgtgctgatgatgcttgacgaagtgcagacgggcatcggccgcacgggctacttcttcagctaccagcgcgcgggcattctgccggacgttgtaacggcggcaaagggccttggcggcggtttgccgatcggcgtgtgcattgcgggcgagaaagtaaaagacgtttttgcccccggcatgaacggctccacgttcggtgcaaaccccgtggtgtgtgccggcgcggtggaggtcgtctcccgcgtatccaagccggaatttttgaaagaagtgcaggaaaagggcgagtattttaaagagcagctgcttaaaatgccgaacgtcgagtttgtccgcggccgcagcatgatgatcggcgtgaaagtgaaggacaaggacgcccacgacgtgctgaacgcttgcgcgaaagcgggcctgctcattttgacggcgaaggaccttgtgcgcttcctgccgccgcttaccatcaccaaagaagagatcgatgccggtctcgcgatttttgcggaacagatcaaataaacggaggaaatccccatgaaacatttattaaaactgctcgatctctccaaagaggagatcatcgacatcctgaaccttgccgaccagctcaagtatgagacaaagcacggcattgagcaccaccacttaaagggcaagtgccttgccatgatctttgagaagtcttccaccagaacgcgcgtttcgtttgaagtgggcatcaatcagcttggcggctatgccgttgtgctggcgggcgagggctcgcagatcggccgcggtgagccggtgcaggataccgcacgcgtgctctcccgctatgtggacggcattatgatccgcacctttgagcagaaggaagttgaagaccttgcaaaatacggctccgtgccggtcatcaacggcctgacggacttctgccacccgtgccagatcttagcggacctcatgacgatccgcgaatataagggctcgttcgacggcctgaagatgtgcttcatcggcgacggcaacaatatgatgaactccctcatcgtcggcggcctgaaggtcggcatggaagttgctgtggcttgcccggagggttaccgcccgccgcaggagatcctggactttgcagccggttacgattgcttcaccctgacggacgacccgatggtcgctgcaaaggacgcggacgtcgtcatcacggatgtgtggacatctatgggtcaggaagaagagcgcgcggcacgtgaaaaggcgtttgcgggctactgcatcgatgagaagatcatgggtgtggcaaagagcgacgccattgtgcagcactgcctgccggcacaccgcggcgaggagatcaccgaagaggtgtttgaagcgaacgcgggcccgatcttcgacgaagcggagaatcgtttgcacgcacaaaaggccgttatggtcacgttaatgaaagattgattgtacaaaacgctgtgttttcgcacggcgttttatatttgccttttgagaaagtatgcggtataattataaataagaatattccgatgcgatttgtcggggtctgaacaaaaaacgcacggaaactgtgcgtgaaacaaccgttttggtcattacgcgctgggcgctctcataccgtataattatgcagacgcgcacgcgccggagaggagacagcttatgctcagagaacagccgtggtttgatttttgtgacgctttgcccattgagatcgagcagaggatcgaagagggcgcagaagatgccgcacgctttaaagaatgtgccgagcaggtaaaggaaatgccgcgcggcgcggcgcgtaccgccgcgggcgcagagcttttggagcagctttgtgcgcttgaaaactcgcaggacaaagacgagccgtctgaccttccgggcatcaaagcggcttccgccggcgagccgaaggaaaaagcggaagcggattacgacaaaatttacggcgcgtggctcggccgctgcgcaggctgccttttgggtcagccggtagagggctggcggcgcgcacgcatcaacgggcttttaaaggagaccggcaatttgccgctgcaaaactacatttcgtccgacatcgggcctatcctgcgcgaaaagtacaacgtgcgcgacgacgggcacgcctacggtgcggagaaaaccgggtggatcaacaatgtctcctatatgccggaggacgacgacacgaactacacgctcatcgcgttgaagcttgtcgagcagtacggacgtgattttacgccggacgacgcggcggaaaactggctgatgaacctgccacttttacacctgtgcacggcggaacgcgtggcgtatatcaatttggcacaatcaattttcccgccggagtcggccgcgtatcgcaacccgtatagggagtggatcggcgcgcagatcaggggcgacctgttcggctacatctgcccgggcgatacggaaacggcggcggaaatggcgtggcgcgatgcatccatctcccacgtgaaaaacggcatctacggcgaaatgtggatcgcctcgatgctcgcgaaagcggcggtcaacgacgacatgccgacgatcatccgctccggcatgaagcagatcccgaaaaagagccgcctttataaagagcttgcagagattttgagccgttttgaaagcggcgacaccgcggaagagacgaaagcgtacatcctcggcaagtacgatgagaacaacccgcaccactggtgccacaccatctcgaacgcggccatcgttgcgatgggcttactctggggcaaaaaggacttcacctacacgatggagctgtgcctgacgatgggctttgacacggactgcaactgcgctacggcgggctctgtgctcggcatggtgctgggtgcgcagcttttgccggaggtttggacggcgccgctcaacgaccgtgtgctttccggcgtggacggcttcgggcttgtgcacatttcagacatggcagcgcgcacgcaggcactcatcgaataaaatttcataagttttggcgggcacacggctttttggcggtgtgtccgctttttatacggaaaacccgcgtgccgttcacaattttttcggaattttcggctattcaaaagggctgagatatgatatactataaggcagtatgggcttttctgccctttggttttgaaaggaaaaacggcatgatcgttctcggcatcgaccccggctacgccattgtcggctacggcgtggtggaaatgaaaaataaccgttaccgcacgttggagcacggcgcggtgacaaccaaagcgggcacggatttcaaccgccgtttggagattatttacgacggcatcgcgcaggttttggcgcagtatcacccggatgcgatctccgtggaaaagctctatttttcaaacaataaaacgaccggcatcggtgtggcggaagcccgtggcgtcattttgcttgcggcgcagaaggcccgcgtgcctgtttttgaatacacccccgtgcaggtgaaattggccgttacgggatatggcaaggctttaaagccgcaggtgatggaaatgacccgccgacttttgtgcctgcgtgaggtgccgaagccggacgacacggcggacgcgctcgccattgccatttgccactgccatgcctccggcacggcgctgcggcagtttttgaggtaacgccgtctatttggacagagagtacagagggtatagaaaggacaaaagcgatgttttacagtcttaccgggaaacttgtacacatggagccgggcgttgtcgctattgaatgcggtggcgtggcgtttaagtgcttcacttccatgaatacgcagaaaaacatgccgcgcatcggcgaaacggctacggtctatacgcatttaaacgtgcgcgaggacgcgcttgatttatacggcttctctacaaaaagcgagctgaactgctacaagatgctgacgaccatcagcggcgtgggcccgaaggcggcgctctccattttatccgaaatgaccccggagggcgttgccatggcggcggcctccggcgacagcaaaaagtttacaaaggcgagcggcgtgggcccgaagcttgcacagcgcatcgtgctggaattgaaagaccgcgtgaagaagatgggctttacgggcggcacgctggaactgaccggcacggacgacgcgggcattgtttctgcgtctcagaacgccgagcaggccgtacaggcgcttattgtgctcggttatacacagtccgaagccgcgcaggccgtggcgaagctggacggctccctctctacggaagaacttattcgcggcgctttaaagagtatggcaagccgcttttaatacacgctgaaaggagagtgcttttcgcgtgacgtttgacagagacaacgaaatggattttgaaaaccgcgtcattgcgccggagtatgtgccggaggacgcggaggtggaaaacccgctgcgcccgcgtacctttgcggactatgtgggccaggaaaaggtaaaagaaaacttagaggtgttcattcaggcggcaaagcagagaaaagaatcgcttgaccacgttttgctctacggcccgccgggtctcggcaaaacgacgcttgcgggcatcattgcaaacgagctcggtgtcaatctgcgcatcacgagtggcccggccatcgaaaagccgggcgacctcgccgcattattgacgaatctgaatcccggcgacgtgctgttcatcgatgagattcaccgtctgccgcgcagtgtggaggagatcttgtaccccgccatggaggactttgcgctcgacattattacaggcaaggggcaaatggcggcgtcctatcatctgccgctgccgcgctttacgcttgtcggtgcaacgacgagagccggtcagctttctgcgccgctgcgcgaccgtttcggcgtggtgctgcgtttggagctctacgagccgaaggagcttgcgaaaatcgtcacccgcagcgccggcattttaggtattgacattgaagcagacggtgcgctggagattgcctcgcgctcgcgcggtacgccgcgtatcgcaaaccgtatgttaaagcgcgtgcgcgactttgcgcagatcatgagcgacggcgtcatcacatacagcacggcgaagattgcgcttgaccgcctcgagattgacgagcttgggctcgattccggcgacagacgcatgctgaacgcgattatccagtattataacggtggccccgtgggtgtggaaacgctggcggcggccattggcgaggaagccgtgacgatcgaagacgtggtggagccgtatctgatgcagatcggctttttgcagcgtaccccgcgcggccgctgtgccacgcgcgcggcttacttgcacctcggacttacgccgccgggaaccgttgcggacgataacccgagattcgacgtatgacactcttttgggaacgcatgcaatcggcatgcgggggaacaggttgaaaagaatcaaaaaagtcaccccttaaaatttttgatataaaaaggagcatacgattatgggaagattattcggtacagacggtgttcgcggtgtcgcgaaccatgaccttacctgcgagcttgcaatgaagcttggccgcgcggccgctgccgtgctcatcaacaaatcaaaccgccacccgcgcgtcatcatcggcaaggatacccgcctttcgagcgacatgctggaaaacgccatggcggccggcctgtgcagcgtaggcgcatcggtcgttctgctgggcgttgtgcctactccggctgtggcgtaccttgtggaaaaatacaaggcagacgccggtgtgatgatctctgcatcacacaactcttacgagtataacggcattaaaattttcagcggcgacggctacaagctgccggacgaccttgaggagcgcattgagtctctgatcctcggcgaagcggctctgccgccgctgcctgcagacagcgacctcggcacggtgtcgcatgcgccgaacgcgctgcgcgattacatcgatcacgtgaagtccacggtgcacttctcgctgacgggccttgaaatcgcgctcgactgcgcgaacggctcctccgcgatgacggcggaaacactgtttacggagctcggcgccaaggtgcacatgctgcatgatgagccgaacggcacgaacatcaacgataactgcggttccacccatatggaatcgctcgtggaatatgtgaagacgcataaggtcgacgcgggcatcgcgtttgacggcgacgccgaccgctgccttgccgtggacgaaaacggcgaagtcatcgacggcgacttcatcatggcaatctgcggcctcgatatgaagagccgcggtaagctgaataaggactgcatcgtcggcaccatcatgacgaacctcggctttgtaaagtgctgcgaagcaaacggcatccactttgaagcgacgaaggtcggcgatcgttacgtgctggaagaaatgctgcttgaaaactacagcttcggcggcgagcagagcggccacgtcattttccgcgatttcgcaacgaccggcgacggccagctgacggcggcgcagcttttgagcatcttaaagcagcgcgaagcaaagctttcttccctcaagaccgtcatggagcgttacccgcagacgatggtgaatatcaaggtctcgccggagggcaagctggcgttccacactgacccgaaggtgaagaaggctattcagcaggcaaccgcaacgctgaacggcgaaggccgcgtcattgtgcgcccgtccggcacagagccgctgctgcgcgtcatggtggaaggcagagatttgacgctgattgaaaagcttgcaaacgatatttctgaagtgattaaggaagaattggtctgatgagagcagcaaactggaaagactatgaattgattgataccggctccggcgagcggttggagcggtggggagacattctcctcatccgccccgatccgcagattatctggaagtcggagaaaaaagatccccgttggcgttccgctcacgcgcgctataagcgttcctctacgggcggcggcaaatgggaggtttataaaaagctgccggacgtgtggaaaatcacgcgcggcgacctcacgttccgcttaaagcccatgggctttaaacacacgggcgttttcccggagcaggccgtgaactgggattacaccgcggcgcgcatccgcgcggcaaaggagaaaaatcccgagcgcgaaattaaaattctaaacttattcggctacaccggcgcggcgacgctcgcgtgtatggaagcgggcgcgacggtcacgcatgtagatgcctccaagggcatggtgcagtgggcgcgcgaaaacgcagcggcatcgaatttggcagagcgcccggtgcgctggcttgtcgatgactgcgtgaaattcgtgcagcgcgaaattcgccgcggcaaccattacgacggcatcatcatggacccgccgtcctacgggcgcggccccggcggcgaggtatggaagcttgaggaacagctttacggtcttgttgaaatgtgcgtgccggtcttgacggacgatccgctgttctttattttgaattcgtacacaacgggactttctccgtccgttatggcgtatctgctcggcgttttgctgcgcccgaagttcggcggctatgtttccgcagatgaaatcggcttgccggtgacggaaacggggcttgttctgccctgcggcagcacggcaatctggtcgggcgagccggtataacgggacttttttgaaacggaagggataaaatggcgtttattgagtgcagagacctgcatttttcatacagcgaagagagcggcgaggttctgcacggcgtcgatctcgacattgaaaagggttcgtttgtggcgctgctcggccacaacggctgcggtaaatccaccatggcgaagctgtttaacggtatgctggtgccgacctccggcaccgtgacggtggacggcatcgataccgccatggaggaaacgcagcttgacgtgcgccgccgcgtgggccttgtgcagcagaacccggataaccagcttgtcgcgggtattgttgaggaagacgtggcattcggcccggaaaacctcggtattgagcccgcagaaatccgccgccgtgtcgatgcggcgctgaaagcggtcaacatgtacgagtaccgcgaccatgcaccgcataagctctccggcggtcagaagcagcgcgtcgcgattgcgggtgttatcgcgatggagaccatgtgcattgtgcttgatgagccgaccgccatgctggacccgcgcggccgacaggaggttatggatacgattcggtatctgaaccgcgaaaagggtatcaccgtcattctcatcacgcactacatggacgaggccgtgcaggccgaccgcgtggtggtgatggacggcggcaacattctgacggacggcgacccgcgcacggtgttcgcgcaggtggagcttttaaagcgccacaagctcgacgtgccgcaggcaacggagcttatttaccgcttaaacgccgccgggtgcagaatttccggcacgccgctcgatgaagacgagtgcgtaaaagcgattgcggagtatttaaaattgggataagaatataaaagggattttgttttttgtgcggggcaagaaccgaaaggacctgcacccggcagaggaaacgaggaaaatcgatggcaattttggaaaccaaaaatctcacatatacctatggcgtcggcacaccgtttgaaaaaacggcggtggaaaacgtgaacctttccgtagaaaagggcgcgttcgtcggcgtgatcgggcatacgggcagcggtaaatccacgctgatccagatgctcaacggcctcatccgccccacaagcgggcaggtgcttttaaacggcgaggacatttgggcaaagccgaaggaaattcgccgcgtgcgctttcaggtgggcatggtgttccagtacccggaataccagctgtttgaagagaccgtcatcaaagacatcatgttcggcccgaaaaacatgggactttccgatgaagaagcactgaagcgcgccaaagaagcggcgcattttacagacttaaagcctgagcttttggagaaatctccgtttgagctttcgggcggcgaaaagcgccgtgcagccattgcgggcgtcatcgccatggatccggaggtgctcattttggatgagcccgccgccggtcttgacccgaagggcagagatgttatcttagcgcagatctccgaatatcaccgccagcgcggcaacaccattttgctcgtctcccacagtatggaggacatcggccgcgtggcagaccgcgtgcttgtgatgaacaacgcccatgccgaaatgtacgacgagacccgcgccgtgttctcgcgcggcgagcttttggagccgatgggtctgcgcctgccgcaaatcacgtccatcatgcgccgtctgcgcaaaatgggtctgccggtcagcgagacggttttaaatgtagacgaagccgtcatggagcttttgccgctcctcaaaaaaaggaaagaggaggacaaaaaccatgctatctgatgtcaccatggggcagtttttccccggcaagtccgtcatgcaccggctcgatccgcgcattaaaatgtgcctgaccgtgtatttcatcgtgctcattttctgctcgaagaattttgtcacgctcggcgcgacgattcttatgagcctgcttggcgtggtgctttccaaagtaccgctgaagctctatttaaaaagcatgaagcctattttgttcatcgtggtgttcaccggcgtattgaatttgttttacggcaccggcgacccgatcttcacgctcgggttcattcacattacgcgaaacggcatcgtgaacagcatcatgatcgccgtgcgcatcgtggtgctcatcctcatcagctctattctgacgtttacaacgtccccgacgcagttgacggacgccattgagcgcctgctaaagccgctggcgctgctgcatgtgccggtgcatgaattcgcaatgatgatgacgatcgcgctgcgctttgtgccgacgctcctcgaagagaccgagaagatcatggcggcgcagaaggcccgcggtgcagatatggaaagcggcggtctgatgcagcgcatcaaggcgctgattccggtgcttatcccgctgtttgtttccgcgttccgccgtgcgtttgaccttgcaacagccatggaaagccgctgctaccacggcggcgaggggcgcacgaaaatgaaggtgctgcacctttcaaaagtagattacatcacgcttatcgtgtgcgttttgtaccttgcggcgttcatcacagcgaacattttgctgcccgccgccattgtgcgataaaattgaggagaagctatggaacgaaacctgctgctgaaaattcaatatgacggcagcgcgtaccacggctggcaggtgcaggaaaacgcccgcagtgtgcaaggggtgtttcaggaggcgttaaagcaggttttgcatacgcagccggacatcaaagcgtgcagccgtacggataccggcgtgcacgcgcgggaattctgcctgagcatgaagctttcgcacaatatcccgccggagcgccttttgggcgcactcaatcattttctgccgccggacattgctgtgctttcctgcgaagaagtgccgcttgattttcacgcacggtactcctgctgtggaaaacggtatgtgtatgaaatctggaacaatcccattcgaagcccgtttctgcacgggcgcgcgctgcactactaccaccatatcgatgaaaaaaagctgaacgaagccgcgcaacactttttgggtgcgcacgatttcacttcgttctgtacactcgataaccgtgacatgggggactttacccgcacggttacggaaagctccgtcacgcgcgagggcgacatggtgcgctttaccgtggcggcggacgggttcctttacaacatggtgcgcatcatgacgggcactttgctcgccgtgcagcaggggcgctttgtccccgaggacatcccgaagatcatcgaggggaaaaaccgcaagcttgcggggccgaccgccccggcgtgtggtctgtatttagaaaaagtgttttataaaccgcaaatataatgcctgcggttcggttggataaatgttctgtattccgattttataacgcggaataagggagaaaagtatggcaagaaaaaagcatgaagcggaaaagaagcacgcgctgcgcaaaaaagaagcaccgcctgtgcaggatataccggatgaaacggaacaccccgcgctttcggaaaagaaaaagccgcgcgtatcgaagcttttgtaccgcatcattgcggcgctgctcatcgcagtagtgctgcttatcattttggaaaataaagataatttaacgccggaaaacatcggcaactggatccgaacaaaggcagtcggcttcggctttggcgacggctatccggcggagctgaccggcagcacagcgcttgtgggtaatttcggcgcggctgacggcaatttgtacgttgtgagcgacacggcgctgacggttctgaacggctccgcaaaggagatgttctctgcgcgccacagctacaacgaccccgcggtctccgaagcgagcggacgctaccttttgtataacgccggcggcacgggttaccgtgtggaaacgtcctccggcacggagatttccggcacgagcgacagcagtatcacgaccggcgtcatttgcgattccggcaaatttgcgctggcggtgcagccctcggactacgcctccgagctgcgcgtatataacaaaaacggcagcttgcagtataaatacagctttgcggattcctatattacggcggtggcactgaatacggacggaacaagagccgcggtggcaagcaccatcacgcacgcaggtacgctcatttcgcgcattacggtgctggatatgtccgaaacggaaccgatagcggagtacgaaagcaacggcaacctgatttttgccgtgcagtggaaccgcagcggccgcgtgacggccatcggcgacacggaaacgctcgtcagcgatacgggctataactttacgccgtatgcatatgacggccgcaccgtgacggcctacacgctcattccttcgggcgcggtggtctccgtttccaactatgcttacggcggcgacagcacgctgctcattttccgtgacagcgcagagcccgtggaaagcgacctttccggccgcgccgtgtggctttccgcagcgggcaataaggtggcggcgctgctttcaagctccgttgtgtccacggacctcacgaccgggcggcaggaagccgcctgcaatgtgccggccgatacaaaaagcatcgccatggcggacgaaagcaccgtgtatctgctcggcgtgcgcgagattcggaaagaaaatcttaaggtgatcgaggccgataatacattgtcgcaaacagagtaatgtggtataatcactgtatcgcacaaggcgcgcggcaggcgcgccggaaaaaggagagtgtttttattgggatggatatttgacattgccgttgtggtgctcgtcatcatcgcggccgtcatcggtgcaaaaaagggatttttcagagcatgctttgatttctgcggcgcgctcatcgcgatgattgcggcggggcttttgagcagtcctgttgcagagtggatctttacaacgttctttcgcccctcgcttgtggagaagatctctgcggcggtcatggggcttggcgcgggcgatgccgtgaacaccgttttcgatgccttcccggagcttatccagcgcgcgcttgaggctgccggcatcacacagggcagtatcatggcgcaggtgcaggataagacggacagcatcgcagaggccattacggatgcactcagccccatgctcatcaacgtcatcggcgtgttcgtcatgctggtgctattcgtattgttcatcgtggtactgagaggcgttgcaacgcttttaacgggcattttctcgctgccggtcttaagcggcatcaacggtgcgctcggcgcagtattcgatgtgctgatgctcgtgctcattttgtgggtcgtcctcgcgtgtacgcaggtatttgtgcccatgctgagcgcagcgcagcaggtaaaggtgcaggcgtttgagaatacttccatgcttttgaagctgcttggcagctttaaccccgcttaccacttaatgcagtgagcagcggctaaaaggagattcggaaattcgtaagggaaaggaactacactatgtctgatgccaaaagccaaaagacaaagaaacccatcaatcagaatttaacggtgccgaacgccatgtctgtgttccgcattttggtcattccgttttttgcgtatttttttctgaaaggcaacctcacagcggccatcgtcgcactggggctttccggcctttccgatgcgctggacggcatgatcgcgcggcacttcaaccagatcacggaattaggcaaaatgctggatccgttagccgataagctgacgcagggcacggtggccatctgtatcgccgtgcactacccgtccatttggccgcttttggcgctgctcgtcttaaaggagctcgtcatgttgtgcggcgcatgctatctgctgaaaaacggcaaaaagccgtgcgcggcaaagtggtacggcaaagtctccacaacactgttttatatcgccatcggactcatcgtcgtcatggacggctttatgaaggtttccgagagcacgttcaatatcgcgtccactacggcgctcgtcatcacggcgggcttcatggtgtacacgttcattcgatatttcggcgtgttccgcgaaattttgagatcgaccgacggcaaatacgatttgaacctgcccgaagaaatgcgggcaaagaaagagcgcacaccgaaaaactaacggtctgcgccggaaaggaaaatgtctatgatgatgtgtacacgctgcaagaagcggcctgcggttgtgttcgtttccccttcaacggatatgaacgccacgcagggctactgtcttgtctgcgcaaaagaactcggcattaagccggtgaatgatattatggagaaaatgggcatcacggaggagcagctggaggcgatgaccgaaagcatgaacgatttgatgtcgatgtccgacgacggcagctttgagccgggcggcgcggtgccgttcccgtccgaactgctgggtcaattcggtatgaacgcaaacggtgacggcacagagccggcaacccgcgaaagccagccgaatgacaagaaaaagaaggagaacttccacaaatcgaagcgtaagcacattgcggcgtactgcaccgacctcaccatgaaggcgagaaacggcgagctggatgccatcatcggccgcgagcgcgagattgagcgtgtggtgcagattttgtcccgccgcacaaagaataatccgtgtctcatcggtgagccgggcgtcggtaaaacggccgttgctgaggggcttgccctgcgcattgcggcaggcgaagtgcccgcgaagctgcgcaaaaaagaagtgcagcttctggatctcacggcgctcgtcgccggtacgcagttccgcggccagtttgaaagccgcatcaagggacttgtggacgaagtgaagcaggacggcaacatcatcctcttcatcgatgaggtgcataacctcgtcggcacaggcgatgcagagggcagcatgaacgcggcgaacattctaaagcctgcgctgtcccgcggagaaattcaggtcatcggcgcaacgacgttctccgagtaccgcaagtacatcgaaaaagacgccgcactggagcgccgcttccagcccgtcaccgtgacagagccgtccatcgacgacgcaacggatatcatccgcggcatcaaaaattactacgaaaaataccataacgtgcgcgtttccgaccagattgcgaagcgcatcgtcgtgctttccgagcgatatatcagcgaccgttacctgccggataaggccatcgatttgttggacgaagcatgcgcctgcgccgcgctgcgcaacaaaaagcttgcggattatgaagaagcaaatttgaagctcgaaaagcagcgcaaggcggaagccgagatcgagggcgcagagaatgtcgattacgaagcgcttgccgaagcgaaatataaagtcgcggcgctcgaaaaagagcttgccgcgtttgacccgaacgaagtcaccgcgccggtaacggaagcggatctcgcgtatgtcatcgagctttggacgggcattcccgctgcaaagattgagcagagcgagctcggcaagcttgcccacctggaagaaaagctgagcgagcacatcgtggggcaggaggaggccgtcaaggctgtttccgccgccatccgccgcagccgcgtgcagatcaacccgcgccgccgcccggcctcgttcatcttcgtcggccccaccggcaccggcaagaccgagcttgtgcgcgtgctttcgaaagagctgttcgattccccggagacgctcatccgcctcgatatgtcggagttcatggaaaagcactcggtctcgaagatcatcggttcgcccccgggctatgtcggctacgatgaagccggtcagctcaccgaaaaggtgcgccgccgcccgtattccgttctgctcttcgatgagatcgaaaaagcacacccggatgttatgaacatcctgctgcaaattctcgacgaaggccgcattacggatgcgcacggtcgcacggtcaactttgagaataccgtcatcgtcatgacctccaacgcgggcagcaacagccgtgaagcgctcgtcggcttcaaccgcaccagcgcggacatcagccgtgaaaaggccatgcgcgcgctgtctgatttcctgcgtcccgagttcctgagccgcatcgatgagattgtcgtcttccgcccgctgaatgaggaggactacaagaagatcgcagtgctcatgctgaacgagtacgtcggcacgcttaatgagcgtggcatcacgctgcgctggacggacgaagccgtcgcgaacatcgcgcatcgtgccgtaggcggcaagagcggcgcccgcgatattcgcaacaccatccgccgcaccgtggaagacaaaatcgcgtccctcatcgtcgagaaaggcgaaggcaacgtcaccggtattctcgtcaccgaaaaggacggcgagatcgatgtggagtcaatctaaccttataaaccgcaaatccccgcacagcgctgttcattaaaagcctgtgcggggatttttgtatgcggaggaagtaagttttggtgtattcagtttgtcaggatgatggcctgctcgaaaagggcggtgtaggcgacctccacgctgtctttgccgtagtagatgtcctgaccggcgagagggtcactgaagtagtagccgttttcgtcatagcccgtaaggacgagcgcatgcatggggtagacccacgtaatctcccggccggtttccggcaccgtccaaatgtcgctttcaatcggtggctccatgcagatagtcgcccagatcatcaccggggtgttgttgtcaatatagctttttaggcgataaagcggcacgccgctcagacgctcggcgtggtagccggtgtttgtgagaaactcgttcatggcgcgctcaatgacggtggagtagcatccccagccggtttccgaaaacgggtcgccggggaacgcctcccatgggtcgcagccgataagctctccgttttcgtccgtgtgcggcgcgtcgcccgtcggcaggtaataggaagcaaattcctccgccgtgacggtgcagccgtagtagtttaacagcatggcggcgccggcgctttcgcagcccgtgggaagcgtaggtagctgcgaaatgtacggcacgtctttaatgcggcgggtggttgcctgcgcggggaaaatatcggcgtaggcaagcgcgggcgtaaagcgcagcagcgccgcggcgagcacgccgaacacgagtatcaccggcaaaaggcacaaaatgcgtctgcgacgccgtgcgcggtgctttaggcggcgcggcacagtgctgcgccggaagctttcgggtgccaaatttgcatttttgcgcgtttgcataaagatccccctttttaaaactcctttataaccgggtgaaaatttctcttagcagagtgagcacaagcaggtgagcggggtaaaacaggtagtagccccactgcaaaactttgcttcggcgaccaagcgtgtggttgtagcataaaagaagcggtacacacagcagtacgaacggccttagccacacgggcagcgtagagccgtagacgaaatactgcaaaacatacaaaagcgtgacgagcccgaaaaacgaccattgctttttggggctttcccgaaagacggcaaagccgaagatccacagcacggcgatgtaattccagtttgcggggtaggcgagcaggcagcacagcccgagcaaaagcagccgcacccaaacgggcgcgcgcagccgtttccacagcgtgacggcgagaagccccaaaaagagcccccacaaaacgcccgtcacgtaccagaactcccaaaccgtgaatttaaagcacagcgcatacggcacatgggagatgactgccgcaataaacagccgcagcaggtactttttcagattcgacgtgtacgcgtagccctccgcaacgaaaaagcacatgatgggcgcggcaatctgccccacggcgtggaaaaacagcgcggcgggcgcggtatccgccaaaaagacggtggcggcatggtccagcaccatggcgaggaccgcaatgagctttaaggtgtttgcgttcagcgcggggcgcgaaaatgtgcacgcggttctgtttatatcggtcatgcattcgcccctctcctctttctgctttaactataccgaaaaagacgcaaaaaagtcccccgcaaactgcaaaaaagttgcaaaattgcgggggacaaggtttagatgtgataaggtcacggcgaggagcactctgcttccgaatcccggtttatccagtaggtttggttcaataagaatcggctgttgtcaaaagcatcactgtaatccgggtcgaagccgaaaccggtcacgcttttggaaatggcgtcgtatgtcagggtaaatgtgcagcccccgctgttgcggaccaccaaaagcgattcattgttgtaatcgatgccgtaatgagaatctaagtcataaaaaaagccgtaccagatgtcgagcgtcgtgttggaaagacgggtgaacagcttagaggtccattccgcgttgcgcagggagtcgttttcgctgatgaaggaggagaaaagctcgtccggcaggcgtgaaatcgcttcataagcaccataataggcgctgctgttgccggagacatcacggctatcgtagaaatcttgaaaaatcttgtcaaactcggtctcgctataacgcatatcggagcaataaaagtacatggtcagtgaggcgcctgcaatgtccataaaggcttcgttgtccggcagagaggcggtctctttgtcgatctccgttgcgtggacataaagcggtatgccggattgcggcgtgaatgcgaagtccactttaaaatcgcgcccctgcaccgtggtgacggtcacgtcctgtgcatacacgtatttcggaatcgaagccaagttgtcgaacgggtcgtatgtgtacatcagcccggagaatttcaaattcggcgaaatattgcagccctttaaaaacggctgaatgatgctgcgcacatacgcatctgaaacttcaatgtacgtcttctggtcggaaagctcattgctgagctgatacagccagttatccatattcctttcaccgtagacactgagctcctgcaaaatgaaattccgcatcgtgttcggcgtggcgttgccattgtttgcatatatggaggattttgaagtgtcgatctcattccacggcggcaggacaagactggaggggtcttccaaatacagcgggctttccgcgccggtaatctgcgcggcactttccttgtttttaaagttcggcatcacgcggctaaatagcgtgggggagaaatagccgagcgtcaaaatggcagcgcaaaggaacaaaggcagaaaaacagagagaaaaatgttgcgtttcatatcgttctgcctcctttgtagcgggtttcgcgctgctttttgcgcttctggcgttctttttcacgcgccttatcgcgtgttttctcgcgcggcgggcgcttctgcaaaagcgcttccagctcgtcgccctgatttttcggaataggcgctacattcatgtgaatgataatcgtggtgcccttctggtaggtggagcgaatttcaagccgcgccccgtggcggcggcagatgtcgtcgcacagcgcaaggccgaggcccgcgccgcctgccttgcggctgcgcgctttgtcttccatgtagaacgcttccgttgcgcggcgcacggtatcgggcttcatgcccatgccgcggtcgatgacggagaccactgtgtggccgtccagctcggactgaatgagccagatttcggaattgtccggggaagccttcgcggcgttatcgatgaggttgtaaagcagcgacaaaaacagctcgcggtcaatgtgcagcatggcgtttttgtgcagtgccgtcagcttgatgccgcgccgcccgagcaccggcgccatggtggcgtgcacatcagagaaaagctgcgccgcgggaatatccgcaaaatcgagcggggtgttatcggtagaagccagcgtcaaaagctttgcggaaagtccgcgcaagcgcttggcttcctccacaatggcagaggcaaagtcgcgccgctgctcgtccgtgacaacgcttttgatgcgcagaatatccgcaaagcccaaaatgctcgtcagcggcgttttcatctcgtgcgccatggcgtccgcaaagcgcttgcggctttctgcaataccgcgcagcttttcctcgcgctcgttgatggaagcggtcatctcgttgatgctgtgtgcaagcgttttcagctccgagctgcccttttcgggcatacgcacggtgtagtcgcccgcggtcgccgcgccgatggtcttcacggcgcgctttaacgggcgcagaaaccccaatacggaaatgagcagcagtacggaaataccgccgccgcagcaaagcccccacatgcgcgcgttgttcaggttggcgtcgtgctcgtcatacacattcgtaacgtcatacaccgtgcgcagctcatatgacatggcttccagcttgatgatggagaccaccatgaggtacgtcttttcgccggcgtcgaagatcaccgttttgccgtccgtaatggcatcgttcggcttgacggaagctaaatcatacgaagcgccgtccaagacctcggtgccgactgccgtgatggtcttgccgccctttttcacttctatcacgtctgcggtggaaatgtctgtcgtaatggtatccttcagcatgtccgtcagctgatcggtgctcaaaaacagcgtattcgcctttaaacgctcatacgccgcgtggttggaaagcgaagccgccaatgccgaatgtgcggaagcggcggagttgacctcgcgggctatggcactgcgaaagtgactatccagtatgtaaaactgcgtgagctgcacggcgagcgtgacgaacacgagcgcaatgagcgatattttttgccatagcttcataaaagactccctttacgcttatcggcgctctaagcggtagccgagcttcggaatggtgatgagcttgccctgcaatcccattttgcggcgcacctgctgcacgtgaatgtccacactgcgcgattcaccggtgaaatcaaagccccaaatgtttgagagcagctgctcgcgcgtgatggcaacgtccggattgcgcatgaaaaagacaagtacgtcaaactccttcggtgtcagcgccacgggcatgccgtttttcagcgccgtgtgcttttcaatgtccacctgaatatcgccgtagcgcaggtgcatttcgcttttgcccgcgcggcgcagcaccacttcaatgcgcgccaaaagctccacgggctcaaacggctttacaatgtaatcctctgcgccgccgcgcagaccctttaccttgtccgccaccgcgccgagcgccgtcaggaaaatcaccggcgtttcgcagccttccccgcggatgtgctccaaaacggcaaagccgtccatgccgggcagcatcacgtcgagcaaaatgaggtcatacgtgccgtttataatggtctgtacggcctcttcgccgtctgcgcagcggtcgtattcgtagtcgccgatcgagagcgtggcggccagcattttcgagatattttcatcgtcttccacaatcagaatgcggatcatacagtcttcctcttttccccttttcgccggcacccatccgacgattatgttaaccctattgtagcatagaaaaaagcgggcttcaaggaaagaagcccgccggtaacggtgtgtaaattcaattttgcaaaaattttgcagaaagggaaaatttagctttcaccgttctccgctttttcgcggtggatgcgcagcaaagtgaagccgaacggcggcagcttgaaatcgccgcctgcggggttcgggtacggcgcgccgaaaataaactctgcattgtcaagatgcagccccggaatgaccgcgttttccatgctgcggttcacggcaacgaacaacgcgtcctcgccgccttccgtttccacatagcgctcaaacgaaagcacattgtcgtgtgcataaacactgcgtaggccgccgtcttttaaaatgtcgccgtgctcctgccgcagcaggccgaggtagcggtaccatgcgataaggtcctcgtcttcgtgtccccacgggtagcatgcgcggttgaacgggtcacggtagccctccatgccggcttcgtcgccgtagtagatgcacggcacgcccggcagcataaactgcaaaaacgcggcaaggcgcatgcgctcaaggccggtttcgcgctgctccggggagagcgtgtgcgcactttgccactcgcggccgcggctgcccgccggttcgccgccgagcaccgtcaaagcgcgttccgtatcgtgcgtgccgatgtggttcatcaaaattcgtaagacctgcggcgggtagttttccacgatggtctcaatgcgatccataatgagcgacgcgtgctcaccgagcagaaacccgaggattgcatcgcgaaatgggtagttcatcacgctgtccagctgcccgcccagcagataccggcggcgcacaccgtaagctgtcttgttggaggcgtcttcccacacttcgccgagcaccatggcgttttcatcctgcgctttcgcggcgcggttcaggcggtcaataaagccgtccggcagctcgtcgacaacgtccaagcgccagccggaagcaccggcctcaagccaatgccggatgataccgtcttcgccgttgatatagttgtcatacgcgggattttcctcgcgcacattcggcagcgtgatgaaattccaccaacattcgtagtcgttcggccagctccgaaagctgtaccacgggtaatacggggaagactgcgagcggtacgcgccgccgtcgccgtagcggccctcgcggttaaaataaatgctgtcgctgcccgtgtggctgaaaacgccgtcgagcaaaacgtgaatgttgcgctctttcgccgccgcgcacagcgagcggaagtcttcctcatcgccgagcagcgggtcaattttctcatagttcgccgtgtcgtaacggtggttggagtgcgattcaaaaatggggttcagataaatgcaggtcacgccgagagacgctaaataatcgagcttttcctcgatgccctttaagtcaccgccgaaaaaatccgagtttgtcacaatgccctgtgcgttcggcttccagtccggctggtcaagccagttttcatgcagcgtgcggtctgccggaacgttttctttcgctttgccggaggacgcaaaacggtccgggaagatttgatacaaaatgccgcccgcaagccagtccggcgttttatatgcaccgtcgtacacggtcagctgccagtcttcacgtgcaccggcgcgcgcctcgccgccgaggtcctttttaaggacagagcgcccacgcgatgtgcgcagctcaaaatgatagaagtaaagccccgttttctgcggcgtaaagtggcactcccaccactcatagtcattgccgttcatgccgcaccagaacatatcaaggcactcaatgcggttatccgggtgctgcaccaaaaggtaggaggcagagcactgcatgtcgcgcggcagcgtaattttaaagtgcacacgcgtgccgtctgccacagcgcccagcgggctgcggtgtatggaatttctggaattaaatagcgtcatcggtaaactctcctgcatgaagaagcagggcactacgaccgcagcgccctgctttttacataaacttacgtgatattacttctttttcgtctcggctttcgtctcgaccggctttgcgagccaaatggtgttcgcataatcgcggatggcgcggtcggcagcgaaaatacctgcctttgcggtgttgacaagggacatagagttccacttggtctggtccttataaagctgttcggctttctgctgtgcatggctgtaagaagcaaagtctgcaagcgccatgtactggtcaacgttgaggagtgcctggtgcaggttctggaacgtcttgccgttaaagccctggccgagagcatccatcgccttgcgaatgatgtcgttgtgctcgtactggtttctcgggttgtagccggaagcgcgcaggctgttgacctcgggcgtcgtcatgccgaagaggatgatgttgtcgtcgcccactgcgtcgtgaatttccacgttcgcgccgtccagtgtgccgagggtgatggcgccgttgatcataaacttcatgttggaggtgccggaagcctctgtacccgcaagggagatctgttcgctgatctctgccgccggggtgagcagctctgcccaggatacgcagtagttttcaacgaagatgacgcgcagcttctggttgacgcgcgggtcgttgttgatggtatcggcaaggcagacgatgaactggagaatttcctttgcgaaatagtagcccggggctgcctttgcgccgaagaagaacgtgtgcggggtataatccgcgttcgggttttcgagcaaccactggtatacggagagaatatgcagcgcattcatgtgctggcgcttgtactcgtgcagacgcttgacctgtacgtcgaaaatgctgttcgggtcaacgatctggccctgcgtgcgcttaacgtgctcggcaaggcgctgcttgttgtgcagcttgatctcggcaagcttcttctgcacggaggtatcgtccttatacttcatcagcttctcaagctgagcagcatcgtggatgaagccgtcgcctgtcaactcggtgataagggaagcaagctccgggttcgactggttcagccagcgacgatgtgcaatgccgtttgtgacgttcttaaatttattcggccactcggtgtagaagtcgtggaacacgctgtccttcaaaatttcgctgtgcagcgcggaaacgccgttcgtgctgtgtgttgcgtatacggcaaggtttgccatgcgcacatagccgtcgttcagcggggccatgcgccagatcttgccttcgtccacgccctttgcacgcatctcaatccagaagcggcggttgatctcttccacaatctggtaaatacgcggcagacgggatttgaacaggtctgcgctccagcactcaagcgcctcgctcataacggtgtggttcgtgtacgcaatggtgcgggtcacaatattccaagctgcgtcccactcgtagccgcattcgtcgagcatgatgcgcatgagctccgggatggcgagcacggggtgcgtgtcattgaggtggatcgccgcaagcttcggcagatcatcaagggagctgtgcgtgtacaggtggcggcgtacgatgtcctgtacggaggcggaaacgaggaagtactgctgtgcaaggcgcaggctcttgccctcgtagtggttatcttccggatagagaacctttgtgacggtctctgccatagctttctgctccatagcgcgcatatagttgccgctgttgaagagcttcatatcaaattcgttggcttccgcacgccagatgcgcagcacagaaatgcccttgccgtccatgccggaaacatacaaatcgtacgggatcgccataacggggttataattcttatgacgtacggaatggtagtggtcatgccactgctcttcaatgtagccgtcgaagtgcacctcaatggcgctttcgtcgaccttctgcatccagacctcgccgcccggaagccagaagtccggcagctccgtctgccaaccctcaacgagcttctggcggaaaataccgtattcatagcgcagggaatagcccatggccgggtagccctgtgttgcaaggccgtcaaggaagcatgcggcaagacggccgaggccgccgttgccaaggccggcgtccggctcctgttcgtaaaggttatcgagctttacgcccatttcggaaagcgctttgcggaagctgtcctcaagaccgaggttaaacaggttgttcttcagggagcggcccagcagaaactccatgcacaggtagtagatctgctttgtctcctgcttttcagcttcgtgtacgaactcattgcggccgcgaacgagcaggtcgcgcaccacaagtgcggatgctttgtagaattcatcgtcggaagcgttctctgcggaaacgccgtaaatgtgcgagagcttctcacggattgcgctcttgacctgcgcgggggtcatcttgtaattcattctttgtcctccatgtgttatgcgtgaaaaacacgccagatttgtattatatgcacaaaattaaatgcgttttacttaaaaaacaaatggtttatacccattatatactaaaatcatgaaaaattcaagaccaatagcgggcggataagcagaaattaaagctgtggctttgtatagtttcgacagaaaatatcggctttcggtataaaccggccgaaaaccgcagtgcgcctgtcttttttcgaccttacacacaccgtataccattatataggggaaaacagcgtgttacaagtacatttgtgtaaaatccgtacggattttgcagaaaaccgccgaaatgcccgttttgcgcgctttttttgacaaggcagggcttttggtatataatgcagaacagagtataacctgcgcagaatcggcgcggggaaaggaatctgtgcaatggaaaaaacgagattcaaactgaatatctgcggcgtggacgtcaccgtttccggcgatgtggaccgcgacggtgcagaagccatcgcagagcgtgtgcgcgtgcgtatggaagaggttttaaacaacgcctacggcgcgaccatagagaaagcggcggtcattgcggccatgaacctgagcgaggagctttcccgcacggaggccgctttgaatcaggcccgcgaggaagcgaatgccctgcgcacaaagacaaaggaatttgccggtgcggacggcctgaaggcccgcctttccgaagcggaaatgaagctcggcgttttgcaggaaaagctgcgccttgccgaaaaccgcgccgaagctgcggaaaaggaagcggaaaaagcgaaagccgctgcccaaaacgcagcgcacacggcagctgcagaaccgctcgacctgccgcccatcgacctgcgcaaccccatgctgcccgattacggcgacgaaacgggtcttgtgagctttttcgaaaaggcagacgtaaaggagaccgcgcgtgaagacgaagaagattgaggtgctcgcgcccgccggtaatcccgcggccctgaaagcggcggtgttcgccggtgcggatgccgtgtacatgggcggctcgctgttttccgccagggcatcggcggtgaatttttcgcgtgaagaaatgcgggaagcggtgctttttgcccgcgagcgcaatgtgcgcgtgtacgtcacggttaacacgcttttaaaagatgacgaacttcccgaagcgctcgatttctgcaagtttctgtgttctgttcccgtagacggcattttgatccaggacatgggcctgtttaatattctgcgcgaagcctgccccgagatgcctttgcacgcctctacccagatgagcctgcacacgcccggcggcgcggccttattaaaagaactcggtgcgtcccgcgttgttttggcgcgtgagatgtctttgaaagaaatcgaagaagtctccaaaaagaccgatgtggagcttgaagctttcgtgcacggcgcgctgtgcatgtcgctttccggccagtgctatttcagcgccatgctcggcggccgcagcggcaaccgtgggcgctgtgctcaaacctgccgtctgccgtttgccgcgcccggtggcacggggcacgacctcagtttaaaggacatgtcgttcatcgaccacatcgaaacgctgcacaatgccggcgtatgttccgcaaagatcgagggtcgcatgaagcggccggaatacgtggcggcggcagtcgcggcgtgccgaaaagcggcagacggcgagcctgtgccggaaaacctgctcgaacatttaaacgcggtgttctcgcgctccggctttacggacggctatctgtccgctcacagaggacgcattatgttcggcacccgcacaaaggaagacgtggagagcgcaaattccgccgtgttcgcgcagctgcatactttatataaaaacgaagcgcagcgtgtgccggtgacattcacattaagcgcctttgcgggcgaaaacccgcgcgtcacagtctcggacggcgaaaacgaagcagtcgtcacggcagaagactgcgtatgcgaaatcgcgcagaagctgcctgtcaacaccgaacgctgggagcagcagttaagaaaaaccggcggcacgccgtatttgtgcgaagcggtgcaaattgacaccgatgaaaaaaccgcattgcccatttccgttttgaacggtctgcgccgtgaagcgctggaaaagctcggcgaacagcgccgcgaaaagcccgccgtatcgtttaaagatattccgcttgatacgcgtacacatggtggaagcggccggcctaaactccgcgcgttcttcaaagactgcgcgcaggtgccggaaaacatttccatgctggaagcggtcattctgccgctcgacgccgacgaaacgacgcgcacgcgctgcaaaaacgcgggtgttgaggtaattcttgccctgccgcgcgcgctgtggggcatcgaaaacgcggtgcgcgcacgcatggaagcgtgcaaagccatgggcgatacgcacttttactgcggcaatctcggtgcgctcgccctgtgcaaggaacttggtgtgtccgcacacggcggattttcgctcaatgtattcaatacggaatgcctgcgcttttttgaagaattcggcttagacgataccgagctttcctttgagctgaccggcgacgaaattcgcggcctcggcggcgagctgccgcgcggcattttgctctacggccgtcagcccctgatgctcacgcgcaactgtccgcttgcaaattcgccgaagggctgcttaaactgcaagcatgcgggcaaaatccgtgaccgcaagggcgtggaatttcccgtgcactgcacgcgttttgagggcaaaaccgtgtattccgaggtctttaacagcgtgccgctcgtgctctttgaccgccccgtttcaaatgtcgatttcggtgttttacgcttctctgtggaaaacgccgtggaaacgcaggcgattttagacgctgccgttcgtcatgaaaagccgcattccgactgcacccgaggacttttcctccgcggcgtgctttgattgtggaaaactcggtggaaagtgtttagaactttctttttgaacagactgtgaactcaaaaaaaccgcagaaataagccgtttttcattttccacagcgctgtggaaacagttatccacaatgagggaaaaccgggaaaaagtgtgaaaaacgggaatttttgggatactgtatatagacaaggagcaaaaaatggaacaaaatatggttttaaaactgatgcgtgtgcgcgagggtgcgatcatcccgaagcaggcgacggcgggcagcgcgggctatgacctgtgcgcgtgtatggacgccccgcagacgatcgagccgggcgagcgctgcgtatttccgagcggtcttgcggcggagatccccgcgggtacggcgggcttcgttttcactcgcagcggtctcggcatcaaaaagggcattcatgtcacgaacggtgtcggtgtcatcgacagcgattaccgcggcgaaatccagatcggcctgcacaatctcagcgcggagccgtacacggtgcagccgggcgagcgcattgcgcaaatgattattatgccgtatttcgcgccggtgattgaggaggtcacatctctaacggagactgaccgcggtgcgggtggattcggaagcacggggacaaaataaattttcaaattgcggcggtgttcacgatttttcggttgaagctccgccgctgttttgttatactgaataagtatgagtaccgtgcgccgcaaagacgcgctgcttaccaaagttttacccgtttcgggaggtcttatcctatgggttctctgcaatctacgatcatggcgggtctttcctcgcttttttctcttttttcaacatctatcaaagacatcggcatcgacctcggcacggccaacacgctcgtttatgtgcgcggtgagggcatcgtgctgcgcgagccgtccgtggtggcggtggacgcgaactccaacgaggttttagccatcggcaaaaaggccaaagaaatgctcggccgcacgccggagtccatcacggcggtacgcccgttaaaagacggcgtcattgcggattttgaggtgacggcagccatgctcaaatactttgtgcgcaaggccatcaaggccggttcgttcacgcgcccgcacatcgtcatctgcattccctccggcgttacggaggtggagcgccgcgcggtggaggacgccgcaaagcaggcgggcgcaagccgtgtagagctcattttggagccggtcgcggcggccataggcgcagggctgcccacgggcgagccggttgcgagcatggttctggacatcggcggcggcacaagcgaaacggcggtcatctcctacggcgaccccatcgtggcagattccgtccgtgtggcaggcgataaatttgacgcagctattgtttcgtacttgcgcaaaaagtacggtgtgcttatcggcgaacgcactgcggaggacgtgaaattgcagatcggctccgcttacccgcttgaggaactcggcagtgtctccatggaggtgcgcggtcgcagcgcggcggatggccagccgaaaaatattaccgtcacggcagaagacgtgcgcgaggcgcttttggtgccgctgaaagctgtgttcgagtccgtacaccgcgttttggagcggaccccgccggagctttccgcagatcttttgaatatgggtctcacgctcacgggcggtggtgcactgctgcgtggcttagaccgctttttgcatgaagcgacgggcctgcccgtgcaggtcgcggagcgcccgctcgactgcgtagccgagggtgcaggccgcacattagagggcaaagcgcatatccccgcaaacgcgcgcggcgcggtaaaagctgcagaaaaataaattgaatttgactttaaataaaaatcgaaaggcaggtgcggcgcatggagaaattcacctctaaaaattttaaaattttaatgatcgcggttgtcattctgctcggcgtgctcgtgtacggcttaaacgccggaacatccgtgttctcaaacgtgttcggcacggtatccgcaccgttgctcacggcggggacgaataccaccgggggtgcaaaggagtttttaaatttggacggcatgtccaaagaggagcttaaagcgctgtacaacgacctttcggaggaaaaccggaagctgcgcgaacagctcgtggattactacaccttaaaagacgagaatgcttcgtatgaaaatatcctctccgtcaaaaaagccatgcccgacctgcaattagccgcgggaagcgtcgtagggcgcgacccgaacgacgtgttcggtgatttcaccatcaactgcggcagccttgcgggcgtatccgtcggcgatgccgtcatcacggaaacgggcgtcgtgggcgttgtggaggaggtctacgccgcgtcaagccgcgtgcggtcgattttatccgaaaagacgcagatcggcgccacggataaatcatgcaaggaaagcggcgtcgtcacaagcgacatccagttcgcaaacagcggcaaggtaaaaatgctgtaccttacaagagataccgaggtgcagccgggctccatcattaccacgagcggcgcgggcggcgtgtttccgggcgatttgctcatcgggcgtgtggacagtgtggagcgcagcaacgcggattcctcgtactatgccattttgaccccatacgtggatgtaaccgaggtgacggacgtcttcgtcgtgacggatttcgacggcaagggcgacgttacaaccggcttgccggagacgaataacaaagatgaagaagaccccgcgcagaccgcaagcaagggaaatgaataaaaggagtgaacagctgtgccgaaccgcaaaaaatggatacgctatgtcttgtatgcggtcgagatcctgctgctgttcctgttacaggatacaccggggctgctgccgcagatcatgggcgtaaaaccgcttccggtgctctctgccgcgctcaccattgccatggtggaggcgtgcacacccgctatggcgttcggcatgtacgccgggtttcttgccgatatcggtagcggggctgtgttcgggtatcacgcgctcacgttcggcgtgctgtgctttttgctgagcggtctgtgcggcaccagaattcaaattcagcttttcacatcggtattgatgggtctgtggagctgtgccgtcgccgttttgctcgattggctcgcgctgtacgttgcagccgggtattcactgacgctgtacgcgctcgtcacaaagtatctgcccatctatttttacacgcttttaacgatacccgcgtgctacggtttgcaggcgtgggtgcgaaagccccgcgtgcgcagcgccatacggcggcgcaggtcaaagctgcataagctgcaaaaaatttaagttttcaacgaagggagacgacagctgtgaaaaaaggacgcggccgctatattttctgcggcgttatgcttgctgccgtctttcttttgtatatcgggcggcttgcccagtggcagcttttagagggcagcacgtttgaagaggaggccgtacagtcctccgcgacgtacttaaagctcaccggcacgcgcggcgaaattttggactgtaacggaaacgtgctcgcaggcaaccgctccgtgtataatgccatatacagtcgtctttccggcagcaatgaaacgcgcaatgccgtcgttttggaggctgtaaagctgctcgaaacgctgaacgtcccgtggacggatctccttcccatcgaaatcaaatcgggcaaatatcagtttaaaaccaaaatgaccgccgagatcgaaacgctgaaaagcgaagacatcttagacttaccctcgagcgctacggcagacgagtgcatggaatcgctcatcgagcggtatgacctcgaagcctatacaagccccgaaaacatccgccgcatcgcgtccgtgcgctacggcatggagcgcgcgtatttcagccgtacgaacccgttcgtgctcgcaaaagatatttccatcgaaacggtggagctcttaagtgagcgcagcgtagatttgccgggtattgaaacgcaggtggagcagacgcgcgaatacccggagggcgatttggccccgcatatcgtcggcacgctgggtgccatttcgcaggagcagtacgatgccgccgaggaagcgggcaacacgtattccgcctcaaacgtttccggctattcctatacggataccgtcggccaaagcggcattgagagcgtgttcgagtctaccctgcgcggcaaaaacggcaaagagagcgtcacaacggatgctaccggcaaagtgacctccaccaccgtgacggagccgccggaagcgggcgactccgtgtggcttaccatagacagcaatgtgcagcgcgcggccgtaaacgcgctcgccgagcagattgaagcgaagccgaccgaagactgcgaggccggtgcggttgtcgccttggacgtgaacaccggcggcatcatcgccagcgcgacctacccgaatttcgaccttgaaaagtacaatacggacgatgcgtatttgacgcagctttatgcggacgaaagccagccgcttttcaaccgcgcattaaacggcatctttacgccgggttccgtttttaagccccttgtcgccttggcggcgctggaggaaggcgtcatcacgccgacctctcaccccgtgaactgcgacggcgcgtaccactattatgcgccggattacgaaccgggctgcctcggcgtgcacggcgaggtggatgtgtacggcgccatccgcaactcctgtaacgcgtttttctttgacgtgggccgcatgctgaccattcacaaaatgcacacgtatgcagagctgttcgctctcggcgaaaagaccgggtgtgaattgaacgagactgcgggcatcatgtccgaccccaaaacgtatacggagcgccacggcgcaaattggtatgacggcctcaccattcaggcagccatcggccagtgcgacgatatgttcacgccaatcgagcttgcggaatactgcgccatgatcgcaaacggcggcacgcgctacaaaacgcatttcttaaataaagtcacggactacgaccgcgcggtggaaaaagagaccgcagagccggaggtcgtgttaaaagcggagattgaagacggatatttcaaggtcgtgcgcgagggcatgcggcaggtgtgcacagagggcacggcggcctcgaccttttcggatttcggcattgccgttgcgggcaagaccggcacggcagaaaacgccgaccattccgataacctgacgttcatcggctttgcgccgtacgagaacccggagattgccgtggcggtcgtcatcgaatacggtggcaagggcgatgccgcaaaagagacggcaaaggccgtttttgaagcttattttgccgaaacgctccaaaaggaggcaaaaaacgcagaaaccacggtaacagagggtgcggaatgacgcgtgcttagggaggatatttgtctgcttcgacaaaaaagccgccgtgtttttgtctcgctgtgataaaattgcggtatagccatttttacttttgactaccgtgcatttttgtgttattatgtttaatgaggtattatctatgggtactgctattgttgtcacatcgggaaaaggcggcgtgggaaaatccaccgtttcgcttgggctggcttctcagtttgcggcgggcggcgaacgcgttctgcttttggattgtgacgcgggcctgcgcagtctggaccgtatgaccggcacagaggaagcgctcgtgtttgacagttcggacgttgtggcagggcgctgcgcgcctgcggatgcgatttacccgtgcgtgaccatgcccggcgtgtctttaatgcctgccccggcaagcggcgaagatcttgtgccggaacgcgtcatgcttagactcgttccgcttttaaagcgctattttgaccgcgtgatccttgattctcccgcgggcgtggggcgtggcttccgcgcggcggcagcggcggcggactgcgcgcttattgtgtgcaactcggaccccgtgtgtatccgcgatgcgtccatcgtgcgcaggcttttaacagagcttgaggtaccgcagcagcggctcgtcatcaatcgctttaacgccgaatatttcggcagcctttccgccgggcgggaagacgccggcggcctgcgcgacctcgatgacgtcatcgaccaaagcggcgtgcggctcatcggcatcgtacccgaagatagacaaatgacggctgcttttcagcgtggctgcgtgccggcggatgacctgcccggcatgacggcgctttcccgcatagcggcacgcatgaacggtgtttcggttcccttatcgttgtgacatttgggataggggccgaatgattataaacagggaggaattttcatgaatatcgcgcttacggcgcatgacgcaaaaaaagagcttatggtacagttctgcatcgcttactgcggcatcctgagccggcataatctctgtgcgaccggcaccaccggtaagcttgtagaggaagcaaccggtctttcggtccaccgctttttaagcggcccacagggcggcgatcagcagattgcggcgcgtatctcctgcaacgagatcgaccttttgctgtacttccgcgaccccatgcagaagcaggcactggagccgcacgataaaaacctgctccgtctctgcgacctgaataacattcccgtggcgacgaacatcgcaacggcagaggtgctcatccatggtctcgagcgcggcgacctcgattggcgcgagattgtaaagctgtaaatttaaaaccaaagcgtatgctttgaaaatacaccggcattgaccgggaagagtatctgctatggggcacaaaacagagagcgccgcaaatgctgagagcggcgcgtgcatccggcagagaaagacacccgtgagccgcacgaaagtgcgttttccgcgttaaggaaagaaaggggaggggaagctttcgctttttctcccgaaaaagggtggcaccacgaacctgtttcgtcccttatccgttttgggtaagggtttttttatttttcatgaatgagagggatattttatggaattgatcacaaaagcgcctaagggcaccgtggatatcattccgggtgaatccgaaaaatggtcgcttgtggaagccgttatgacggatgaagcggaactgaacggcttttccgagatccgcaccccggtgtttgagcacaccgagcttttcctgcgctccgtcggcgacaccaccgacgtggtggaaaagcagatgtacacgtttgaagataagggcggccgctccattacgctgcgcccggagggcacggcgggcgctgtgcgcgccatgctggaaaacggcctgtataacggcggttacccggtaaagctctactataagacctcctgctaccgctacgaaaagccgcaggcgggccgtctgcgtgagctgcaccagttcggcgtggagatgttcggcaccgcagaaccggcggcggacgcacaggtcatcgctatggctatgtccattttcaatcgtctcggccttgccgatgacattgaggtctccatcaactccatcggctgccccacctgccgtgcggagtacagaaaggcgctgagaacgtattttgaaggctataaggatcagctctgcgagacctgcaattcccgcttggagcgcaaccccatgcgcattctggactgcaaaagccccgtttgcggcgagattgccaagggcgcgccgaaaatcacggattatctctgcgacgactgccgtgcgcactttgaaaaggtacagatgctgctgaaatctatcgatattccgttttccatcgatcccggcctcgtccgcggcctcgattactacacccgcaccgtgtttgagtttccttcgaagcgcttcggctttgcgctcggcggcggcggacgctacgacggccttgtggaagaagtcggcggcaagcccacaccggcgctcggcttcggtctcggtcttgaccgtatcctgatggcgatgaacgagatgggcgcagacttcggaaatgactcaaagtgcgaggtctacattgcgtctttgggcgaagcggcgcagatgaaggcgtttcagctcaccgaaaaaatgcacagctgcggcatcgcggcagactgcgacctgtgtgcacgcggtctgaaagctcagatgaaatacgccgacaaaatcggcgcgcagtacagcatcgtcctcggcgacgatgagatcgcaaacggcgaagccgtgcttaaaaacatgaagacgggcgaaaagaagaagatctcccttaacgatgactttgttgatacgtacatcacggccgtcaccgaacaggaagacgccatgcccatcacattttaaccggtcacactaacgaaagaggaaatcaatcatgacacaatcgagaacccatacctgcggcgaactccgccttgcaaacgcaggcgagaccgtcacactggtcggctggatggaaaacatccgcgaagtcggcaataactttgcgtttttggtgctgcgcgatttctacggcaccacgcaggtcgtcatcgaaaacgaagagatgatgaacattgtaaagcccctcaataaggaatccacgatttccgttacgggcatcgtgcgcgagcgcaccagcaaaaacccgaagctccccaccggcgacatcgagatcgcgccgacggagatcaccgtgctcggccgctgccgttataacgagctgccgttcgagatcaaccactcccgcgaagcggacgagagccagcgtttaaaataccgctatctcgacctgcgtaatccggaagtgaaagccaacatcatcctgcgctgcaacgttgtttccgctttgcgcaccgctatgacggagcacggctttttagagatcaccacgccgatcctcacggcttcttcgccggagggcgcgcgcgattacctcgtcccggcgcgtaagcacccgggcaagttctacgccctgccgcaggcaccgcagcaatttaagcagctcctcatgaccgcgggctttgaccgctacttccagattgcaccgtgcttccgcgacgaggatgcgcgcggcgaccgttctccgggcgaattctaccagatggatatggaaatggcgtttgcctcgcaggaagacgtttttgccgtcatcgaagacgttctcccgccgatttttgcaaagtacggcacgtataacatcgcgtcctccgcaccgtttgcccgcatcccgtaccgtcaggccatggaggagttcggctccgataagccggacctgcgcatcgacctgcgcgtcaaggacgttacggacattctgcaaaactgcggcttcggcccgtttgaaaacaatatcgtcaaggctgtcccggtttcaaactgcaagcttgcccgcaaggcggtcgataagctctgcgcagacgtagaggtgcaggccggccagaagccgtactggttcaaggtcgatgaatccggcgccattgccggcggcatcgcaaagtttatcaatgcggatgaaaagaccgtggaagccgtcaaatccgcgctgtctctcgagccgaatacgctcgtgttcctctccgcaggcaagcgtgaggaggcccagaagaccgcaggcgtcatgcgtcgtatgctcggcgcggcgtgcgagggccacatggataaagagcgctacgagttctgctggatcgtcgatttcccaatgtacgagatcggcgaggaatccggcgagctggagttctgccacaacccgttctccatgccctccggcggtatggaaacgctgcttaaggccgagcgcggcgagattgacccgctcgacattctggcagaccagtacgacctcgtttgcaacggcgtagagctctcctccggtgctgtgcgtaaccatgacccggagatcatggttaaggcgttcgagatggtacgcctcggcgaagacgatgtaaaggcgaagttcccggccatgtacaacgcattctgctacggagcgccgccgcacgccggcatcgccccgggcgtagaccgcatggttatgctgctctccggcgaagaatccatccgcgaggtcatcgcgttcccgatgaacaagagcgcacaggatgtcatgatggacgcaccgtccaaagtcaccgaggcacagctcaaagagctgcacatcgccgtgacggaagaagagtaatgttctctttagaacagaacacgtataaaaacgcgcggctcggcgataccgatttcacggacgccgagctgcgcggctatacgtttgaaaattgcgacctgcgcggcgcgatgttttccggcgctttgcttgaaaaatgccgcttttctgcgtgtgcgttcgatttttctcgcttaaacgacgttttggcgcgcggctgttcgtttgaaaactgcacgttttcgggcgcaagcctgtttgtcaccgcgtttgagaattgccgtgtctcgggctgctcctttgcgggcgcagacctcaccggttgggccgtgcgcggcggcacactcgaatactgtgtgctcgatcattgtccgctcaaaaagcaggacttttccggcatcagtctgcgcggtacaagctttgcggaagcggacctcgaaaaagccgatctttccggctgcgaccttacggagaccgtgttccgcaatgcgcagctgaaagaatgcgacctgcgccgtgccaaattttcgcgcaccgatatccgctttgcaaaaatgcagaaaacaaagatcgatttggagggcgcggtgtatctcgcaggactgctcggcgctgtcgtcaactaaaaaagccggcaaaaaatttcgtgaaaaaacgcgttttattttgtcaaccgccgtatggcgtgcatagggcttataaacgggtatagacggtgtacaaccgcgccgaaatgtgccccgaaaaccgtgaaaaaacgccatgaaatcacaagttataccgcgcgttatggaaaaaaccgcttctatgacgcgcggtatattttgttattattatgtaaacctaatactatatatagtggttttgacactaaatatgcccttgacatgtataggaaaagcgcctataatcgaaagtacagaaagcgcaaagcgaaggcttttaggctttgccgcaggggagaaacggaaagggaagttaaacgtatgattcgatatattgtcaagcgcagcggggacaaggtgtcgttcgatgcgcggaaaatcaaaagcgccatttttaaggccaataccaggatcgccgcagagcgtatgagcgacgccgatctgaacgaattgaccgaagaggtgctcacggcgcttgaaaagctgccgggtacacccacggcgcaggaaattcaaaacgtggtggaggaaaagcttcttgccgccgattacgccaaaacggcgaacgcttacatcaattatcgcacggagcacgagcacctgcgcgaaatggacgacgagctcgtgaagatttttgaaaacctcacgttccgcccgtccgaagaggatgacttaaagcgcgaaaacgcgaatatcaacgccgataccgccatgggcaccatgctgaaatacggctccgaaagcgccaaggcgttttacgataaatatgtcatcccgccggagattgccgaagcacacgcgagcggcgacatccacattcacgataaagacttttacgccctcaccgaaacatgctgtcagattgaccttttaaagctgtttcaagacggattttccacaggccacggctatttgagagagccgaacgacatccgcagctacgccgcgctcgcgtgcatcgccattcaggcaaaccaaaacgagatgcacggcggccaaagcgtgccgaatttcgactacgctatggcggagggcgtgaagaaaacataccgcaagcagtatttccgtgcgcttgcgcagtatattgaggtgcggtttgatatgagcgcctccgatgccgccgcgctgacggctgccatcaaagaagcgctcggcaccgatgtcacaatgcacaccgcagaagcttacgccgaaaagctgcgcgcgtttctgccgcgccatcaagcagaaaacggcttccagatcatcacgggcgacgctgcccgcgccgccgcggaatacgccgcaaagaccgcctacaaagagacggatgctgccacgtatcaggccatggaagcgctcgtccacaatttaaacaccatgaattcccgcgccggcgcacaggtaccgtttagctccttaaactacggcacggatacctcgccggagggcagaatggccgtgcacaacctgctccgcgctacggaagcggggctcggcgacggcgaaacacccattttcccggtccaaattttcaaagtcaaggagggcgtcaactacaatgagggcgacccgaactatgacctgttccgccacgcgctgcgctgctccgccaagcgcctgttcccgaatttcagttttttggacgccccgttcaacctgcaatactataaacccggcgattataacaccgaggtggcgtacatgggctgccgtacgcgcgtcatgggcaatgtattcgataacacaaaggaagtcacctgcggcagaggcaatttgagtttcacctccatcaacctgccgcgcatcggcattgaagcgaagggcgatatgaaaacgttctataagctgctcgatgaaaaaatcgcgctcgtggaagaacagcttctgcaccgcttcaaaatccagtgcagcaaaaaggtgtataattatccgttcctcatggggcagggcgtgtggatcgattccgaaaagctcgaccgcaacgattccgtcgccgaagtcttaaagcacggcaccttaagtgttggcttcatcggccttgccgagaccttaaaagccctcaccggtaagcaccacggcgaaagcgaagaaagctggaagctggggcttgagattatctcccatatgcgggagaaaatggacgaaaaaagccgtgagaccggcctcaacttcaccttgctcgcaacgcccgcagaggggctttccggccgctttgtgcgcatagaccaaaagaaatacggcaaaattcccggcgttacggacagagagtattacacaaactcgtttcacgtgccggtgtactaccccatcagcgcctatgaaaagattcgcagagaagcgccgtttcacgcgctcacgaatgcggggcatatcagctacgtggagctcgacggcgatacgtgcaaaaacatcgacgcatttgaaagcatcgtgcgctgcatgaaagaaatgggcatcggctatggctcggtcaaccaccccgtagacagagaccctgtgtgcgggtataacggcatcatcgacaaggtgtgcccgaggtgcggcagaagagagggcgaaggcgttccgctcgaaaggcttctggagctgaaaaagcgctaccacgacgtcccggattattcgcatttaattagatagagcaaagttaccgttaacggtgattaaaagtttcgcccgccttttcaaaggcggtggggtcttggggcgaagccccgagtcgctttctgcagaaaacgaaatctatttgcctaccaaaaatcaggacgggaacttcaacagtccggtggactgttgaagtgtgggagacccaattagggggtctcccaatgaacttgcatcgcaagttcataaaagcaaaaacggcaacacatgggtttaacctgaacgacaagtcgtttagctatggttttgtgcttttgatgattgaaaatcatcaatttcgctgcgcgaaaccagcccaagaatcacctaaaaggcggcatccgctgcctttagaaaaattgaaatgaatgtaaaaatgtatttataaaaagaatcgaggcagttatcatgtcacccaaaacgcagaaaaatacaaaaaccatcatcgtcggcgaaggccgcgggttcgaccgcatccgccgcatcacaggctaccttgtcggcaccaccgaccgctggaacgacgccaaacgcgccgaagaacacgaccgcgtaaagcacagcctgtaaggcacggcaaaatggaaatccgcatttccggcatcgtgaacgattccatcgtggacgggcgcggcatccgcctcaccgtgttcacacagggctgtccgcaccattgtcccggctgccataacccccaaacgcatgattttgcgggcggcagggtggaagacaccgatgtcatctttgacatgttcaaaaaaaatccgttgctgcgcggcatcacattttcgggcggtgagccgttctgccagccaaagccgcttttagcgctcgcaaagcaggtgcacgccctgcataaagacgtcaccgcctattccggctggacatatgagcagcttgtttctatgcacagccccgatgtggacgcgcttttaaacgcgtgcgacgttctggtggacgggccgtatatcgaacagcagcgcaatcttgagctgctctttcgcggcagcgaaaaccagcgtcttatcgatatgaacgccacccgccgaaacggacgcgtaacgcttttacagctcgattattaaaaaactccgcaaatttcctctgatatgcgctaaatcaataccgctatatcgaaaaaagatgggggtaattcatgattttgtaattgattatgcggaaaacttgtggtagaataaagacaaatgggttattttacattttatttgcctttttggcgaaaggagaaataacaatgactaacaacaagacaattcttgcttggatcgacgagatgaaagctcttgtcaatccggatcaggttgtttggatcgacggctccgaagagcagctcgaagagctccgcaaggaagcggttgagtccggcgaaatgatcaagctgaatcaggaaaagctcccgggctgctactatcacagaacagctccgaatgatgttgcccgtgttgaggacagaaccctcatctgctccagaaaagaagaggacgcaggcccgaccaaccactggaaagagccgcaggaagcatacaagatgctgtacgatattgctcgtggcagctacaagggccgtaccatgtacgttatcccgtactccatgggcccggtcggttccccgctcgctaagatcggcgttgagctgacagactccatctatgttgttctcaacatgtccatcatgaccagagtcggtcagaaggtcatggacgttctcggcgacagcaacgactgggttcgcggtctgcactgcaagtgcgacgttgacccggagaagcgctggatctgccagttcccggaagacaacaccatcatctccgtaaactccgcttacggcggcaacgttctgctcggcaagaagtgcttcgctctgcgtatcgcttcctatcaggctaagaacgaaggctggatggcagagcacatgctcatcctcggcgttgagaacccgaagggcgaggttaagtacgtttgcgctgcattcccgtctgcttgcggcaagaccaacctggctatgatgattccgccggaaggctaccgtgcaaagggctacaaggtctggaccgtcggcgacgacatcgcttggatgcgcaagggcccggatggcagactgtatgccatcaacccggaaaacggcttcttcggtgtcgctcccggcacgaacatgaagtccaacccgaacgctcttatctccacccagaagggcaccatcttcaccaacgttgcgcgtaacctcgatgacaacaccgtttggtgggagagcctcgacaagaacccgccggttaacgcagaagagtggaagggcgctaaggtaaacggccccgagtatgttgctgctggcaacaagctggctcatccgaacagccgcttcaccgctcctaccgctaactgcccgtgcctctccagcgagtttgagaacccgcagggtgttccggtctccgctatcgtcttcggcggccgccgtccggatacggttccgctggtttaccagtccagaagctggaacaacggtgtcttcatcggctccatcaccggctccgagaccaccgcagccgctgcaggtgcagtcggcgttgtccgtcgtgacccgatggctatgctcccgttctgcggctacaacatgggcgactacttcaagcactggatcgaaatgggcgagatgctcggcgacaaggctccgaagatcttcaacgtcaactggttccgtgtcgacgaagacggccacttcatttggccgggcttcggtgacaacctccgtgttctcgagtggatcctcaagcgctgcgataacgaagttgacgctgttgagacggcaatcggctacgttccgaagccggaagacatcaacctcgaaggcctcaaggacttcgatgaggagaagctcgcttccatcctcaaggttgataacgctaagtgggctaaggaagctgccggcgtagaggaattctacaagaagttcggcgacaagctcccgcaggagctcagagacgagctcaacggcctcgaagagcgcaccaaggcttaatcaaaacttaaatcgtaagatttaacgcatagaaagcgccgcttttggttcaccccggaagcggcacttttgcatatttatggatgtttttgcacggcgtttggcacaatttatccgtcaatttccatcgcaaattaccctcgaagctcaaaacaaaagcacgcagatttaagtgatctgcgtgcttttctcatatctttgtccagcaaaaagatttcgccgtttgcgaatggcgaccaaaggcgttgcctttggaaaccaccagctttttgaaaaaagttggattaaaaacttttaatcgccgttgtcggcaactcgcttatcttaccttccagcggtcgttatacgtgccggaaaggtctgcaatcttgccgctgtcttctttctcttccttcacgtgtgaggtcgctctgcgctcgtttaaatatttcaggaacagctcgccgtctaccggcacagcctgcggcttgcccgtccagtcggaaaggtgaatggcgttcgagatattcaggccgttaatgccctcatagcccggcgccagcagctcttcgccgtacagaatagcgtttgtgaagttctgcagaatgccgttatgcccaagctcaatgttgtccgtttccacttcggtcacggtcatttcgggctgtgcaaagccctctttgcacgtcacgcagaattcgcgctccggcacggcgagcttccaccaggtcagcttgccttcttcccaaacaagcttgcctttgtcgcctgtaatctccaaacggttcgtgcccgggcactcacccgtcgtggtgatgaacgcgcccgtcgcaccgttcgggtactcggcgtaagccgtcacttcgtcctcaacctcaatgttgtgccaatggccgtacttgcagtggcccatcacgcggttcggcatgccgaagatccattgccacaagtcaagctgatgcgggcactggttcagcagtacgccgccgccttcgcctgcccacgtcgcacgccacgtgccgctgtcgtagtatgcctgcgtgcggtaccagttcgtaatgatccaaatgcagcgtttcagttcgcccagctcgccgctctgcacgatctcgcgcattttctggaacttcgggttcgtgcgctgattgtacatgatgccgaacaccttgccggattttttcgcggccgcattcatttcctccacctgctttgtgtaaacgccggcaggcttctccgtcagcacgttcttgcccttttcaaaagcatagatcgcaatgggggagtggaagtaatgcggtgtcgccacgatcaccgtgtcacacacaccgctgtcaatcatttccttgtagtcttcatagcacggtacgccgggcagattttcgtccgcccaaaggcgcttcgattccgcaatatcgcacacggcggcaagctccatgcccttgatattgccggagaaaatgctctttgcgtgcgccgaacccatgttgccgatgccgacaatgccgacctttactgtttcgctcataaaattaccttctttctgttattcgatggttttcaaaatatcgtgcagcgcgtcggaagccacatcaaacgcttcgtccgcgtctttatatacgcgcttatgcagaacgtcctcgccctgcaagttttgcaagccgctgaaatcgtacaaatgcggctccagcgtcagcatgtacggcttacccgtttccgccaacgtttttaaaatactcggcacagagccgtctccctcacccgcaggcaccacgctgccgtctttaaacagcgcgtctttgatgtgcatatagtcgatgatcggcgcgagcgccttaaagttcaccgccgggtcatcgccgcactgaatgtagtttgcggggtcaaatacgcaccgcagcgccggaatggctttgtgcagcttctccacgcgcttgagcgtgtcgccgtaaatgcccttctcattctcgtggcagcagtgtacgccatttgcttcgccgtagtccaccattttctgtattcgctcgatcacggtatcgtgataaatctccggatttttgccctccggaatatagaagctgaacatacgaatgcgcgtggtgtgcagctttttcgcaatctccacagcgcgcttgaatttctcgaagtgcggtgcaaagtcgtcctcaatgccgatcttgccgatgggcgagccgatggcggaaatgccgatattgcccgctgcaagcttcttttcaacaacatcaagctcctcgtccgtcaggtctaaaatgcccttgccgtccacgccgcggatttccatcagcggaatatgcttgcggtgcagcgctgcaatctgccggtcaaactccggcgaggcttcgtctgcaaacgcggaaagtgtaaactgtgtcatataccctccttagaacgtgcagccggcacgaagcaggttttcggcgctcagcttcagctcgtcaaacgggttgcggtcgtagcagttgtcctgttcgatcatcgcatattgaatgcctgtcttttcgcatgcctcaatgatggacttaaagtccatgttgccgtccatcacggctgcaaagcgctgctcgtggccgtgcatcttcatgtccttaaagtggatgacatcaatgcgtcccgccattttttcaatctgtacctgcggcgagcgcccaccgtactgcgtccaataaacgtccaagataaagccccattttgccgggtcggtttcctccaccatgtggtcgatgaggcacttgccgtcaaatttctcgtattcaaagccgtggttgtggtaatgcagcttcatgcccgcgtcgtgcagcttgtcggcggcggggccgaaatccttcaaaaacgcgcgcataccttccagcgagcccgtgtatttctgcggcatcatgccgatgcccacgtggttcgtaccgaaaatgcggtggttctcaatcaccttttcggtgttctccagaatgagctgcgggttcgtatgcgtaatgatgatggaaagcccgttttcatcgcaaatctcgcggatgatatgcgggtcaatgtcgccaaacgcagagacctgcaaggtcttgtagccgatgtcatgcagctttttcgccgtctctctaaaatcggcttcgttctgcgcatagtcgcggatggtgaagccctgtgcaccgatgatcatgaaaaattcctcccaaaagtcagattatacgccggagtacgcggagaaaccgccgtccactgggattgtgatgccggtcacaaaaccggacgcgtcattgtcgatgaggaagcgcagtgtgccgagcagttcctcaggctcgccgaagcggcccatcggggtctgcgagatgattttgtggctgcgcggggtcaggctgccgtcctcgttaaagagcaaggtgcggttctggtttgttgcaaagaagcccggcgcaatggcgttcacgcggatgttgcagtttgcaaagtgtaccgccagccactgcgtgaagttcgagaccgctgccttggcaccgctgtacgccgggatcttcgtcagtggcgtaaacgcgttcatcgaggagatattcacaatgcagccgcctgtttccaacatgtcggtcgcaaacgcctgcgtcgtcagcagcgtgccgagaaagttcaggttgaacacgaacgaaacgccgtcctggtcaaggtcaaagaacgaccgcgcgttttcgtccagcatatcttctttgctgaaatactcgctcgtcgtggtgcccttcgggttgttgccgcccgcaccgttgatgagcacctcgcacgggccgaatttttccagcacaacgtcatgcgcctttttcagactctctttgtccagcacattcgcctgcacggcaatggcctcaccgcccgccttgcggataccctccgcctcgcgctccgcagcctccaagttgaggtcaagcagtgcgattttgtgcccgtctgcggcaagcgcgcgggaaaaagcgctgcaaagcacgccgcccgcgccggtaatgacaatattcataggaaattcctccttagtataacgtgacttttattcgccgaatagcttgcggctgttttccacgcaaaggtcggtcaacagcttcagcgccgccttttcgctgaggaacgtgccgtccataagctcttccgcaaccctgttgcacagcacacggcggaaataatcgtggcgcgcataggaaaggaagctgcggctgtccgtcagcatgccggtaaactgcccaaggtggccggtttccgccataatgttcagctgctcctccatgccgcgcttgtggtcacagaaccaccacgctgcgccgggcacaacgcccttaaaactgcccgccgtcgtcgcaagcgccatatacatcgaaggctccagcgtgtataagattgtgtgcggcaacgaatccctgcggtccatcgtgtccaaaagtactgcaacttcgtgctccgggatcgggtcgcccacgcaatcgccgccggcgtccggacccacggtctcaaacagccgcgtgcatgcgttacgctttacgttcaggtgcagctgcatcatcacatgatgcgccttgtattcgtgcgccaaatacacatacatttcaaatagaaaattacggaactcgttttccgggattgtctttcccttcagcgcctttttaaacgtctccgcggcatcgcagcttttgtcttccttcggaaagccctcaatgccgatatcgctcacgcggcagccgttctcgcagaagaaatcaagccgctttgaaagcgccgttttcaggtcgtcgagcgtctccacactaaaaccgcacacttcgccgaggtgcaaggcgtagtcgcgatagttcgcgcggcaaatgttcagcgccgcgtccgtgcggaacgagggcaccacgcgcaccgggaagttcttctccttcgcaatttccttgtggtattccaaagaatctgccgggtcgtccgttgtcgccacaagctccacatggctttgcagcatcagtttgcgcggggagaggtggtgctccttgatatacgcgttcgcgcggtcaaaaatatcgtccgcactttccgctgtcagcgtgtcttcaatgccgaaaaacatcgaaagctccatgtgtgaccacacataaagcgggttgcccatcgcagtctcgaggcacgccgcccacgcgcggaacttctcgcgcggctccgcgtcgcctgtgatgagcgcctccggcacgccgcaggcacgcatcaaacgccacttgtagtggtcgccgcccagccagatctgcgcaatatccgggaattccctgtcctccaaaatctccttcggcgagagatggcagtggtagtcgacgatcggcaggtcgcgcaccgcgtcatataaattcttagcaacatcgcttttcaaaaacagatcgtttcgcatctgaataaactcctttcgggcggcagaaaaaggtaaagtttccccaccgctgctactgtaagtatagcacgatgaattgcaaaataaatgatatattgcggcgaatatattgcaaatcggcgcaaactgtgctatgatttctccaaaggaagagggtgaaaaacgtagaaacaggtaaaaatgacgaaatgctgcggcaagattttcagctttcacacaatcgagacccctattttcgcaccatggagtttcacgcgcacgattttttggagctctattactttttggacggcagcgtgacgtattatattgaagatcaggtctacgacctttgccccggcgatctgctcatcattcccgccggcaaaatgcaccgccccgtcatcgcaaacgaacacgccgcctatgagcgcatggtgctgtggatcaccccgcagtacctccaaggcatcgacagccccgcgggcgacctgcaaaaaaatctgcaaaaggtgggggagcacggctactgcgtgccttttcgcggcgatgaaacagtgtttgtcacggcgctcttaaaagagctcttgtatatgcagaaaaacgataccgaccctaagttctgcgccggcgccgtagagctgtacctgtggacgatcttccgctcctacggcgttatcgataccacgcaccgcaatgaaacacaggtcatcccgcaggtcattcgctatatcacggagcatttcagcgagcctttaacgctcgaagacatcgccgcagagttctttgtcagcaaatcgtacttaaaccgccactttaaagcatataccaattccaccgtgtacgcctacatcatggcgcttcggctcacccatgcccgccgtatgctgcgcgaaggcatccctgccgtagaagctggccgcgagtgcggattttccgattattccacattctacaaagccttcaaaacccaaaccggcctttcaccccagcagtttaaaagccgggcttgattttggaaaaatgcgtatgcttcacgcgctttcgcagccgcagacagaacataggaagagcggctgacgttttcttaaaatttcctgacaagcatttacaaccgaaatcaaattcgctataatggagataacaaaaatcaatgcgcggcgaaacagcggcggcatgtcgactgcgggtatctgcgcgaaaggacggtagaaatttatggctttttgtgaaaaatgcggagcacagatccccgaaaacggcaccttctgcgcagcttgcggtgcgcccgtagcggcacaggcgcagcccacccggatcccggagcagccggcagcacagccgcaggcacccgagcagcagccccagccgccggtttacccgcagcagcccgtataccagcagccggtctatccccagcagcctgcgtatgacccggcagatcacaccgcagagttcgacccggaggatgtctcccagaataaggtcatcgccatggcagcgtacattctcggcaccgtcggcatcatcatcgcactgcttgcggcaccgcagagcaaatacgcggcgttccattcccgtcaggcgttgaagctcgacatcgtcagcaccctgctgctcatcgtttccgctgtgcttgccttcacgttcattgtgccgattgccggcgctgtctgcattgcaattctcttcgtcgtgcgcatcatctgcttcttccaggtatgcagcggcaaagcaaaggacgccgccatcatcggcaagctgccgttcttgaagtaagaaatacaacgttacagaaatacaacgttacatttaaaaaggctcgcgtagctcattttcaagaaacccttgatagggcttcttgcgaaaaaccgtccactggacggtttttctattttcctgatcttcgattaggcaaaaagtattccgccatttgcaaatggcggctctgggcgttgctccgagatcccataaactttctcccacccacacacttttttcttgctttttcgccctaatcaggtataattaaactgagtatgtattgtatgaaaaccgtcgaagccacaacggcctcgacgataagcagataaaaaggacggaaagaaactatggccgattttgagccgttttttgaactgaaaaatcaatatagagagtcctgcccggtcttgctgcaaagcggcgcgctgtaccgtgaagagtccaccgtgtccgccgaagcggaagagatcgaaactgcggaagctactctccccgcagagcaggaagaagcggcttccccgcgcacattcctgcgtctcgcattccgcaatatcgacccccgtgccgtgacgagcgtttatgtcgatatccacattttcgacaaagccacaaacgagctcgccgtcgtgcgcgaccgccgctatctcgtgcctattttgggccgcgatgcggtcttcggcgcagacgaggagatcgacgttgatgatgccgcgtacagcttctccgtcgccattaagaaggtgcagttcgagggcgaagacgtgttctggaacggcagtgcctcactgctgtttgaaaatctccccgaacaggcgaaaatcgcggacgtcatggaggacgaagacctccgtgcacagtatcagcgcgatttcaccgaaatggcagaggataaagaagctgcggcgcagttcgccccgcaggaatataaagatctctggatgtgcgcctgcggcgaagtgaaccacaaagatgaagaaaaatgcgccgcctgcggtgccgagtacgggccccagcacgcactgcttgaagacgaagaaaagctgaaagaaaacctcgaagcctataacaaggctgaagctgaaaaggccgaggccgcccgcatcgccgcggaaaagaaagcggcagaggaaaaagccgccgccgaagctgccgcccgcaaagcggcagaggaaaaggctgccgctgaggaagctgcccgcaaaaagcggctccaccgcaaaatttttctgtctatttccattccgctcgccgtcctcatcgccgcgttcgtcgtggtgctcatcgtctacatcatcccgcagaaccactataacgatgccgccgccttgctcgaagccggcaagtatgacgaagccatcaccgcgttcacggcgctcgacggatacagcgacagcgccgcccgtatcacggaggcagagtataaaaaagcctgcgacctgctcgaaaacgagaaattcgcagaagccatcgaagccttcaccgccctcggcgattacgaagacagcaaagatcggatcaccgaggccgagtaccgccgtgccgtaaagacgtttgaaagcggcgcatacgaagacgcgttaaatctccttgagcccctcaaggattacaaggatgccgccgaaaaaatcgagacctgtcactatgagctcggcatgaaggccctcgaagcggataacttaaagtctgccgccgcgcattttaaagaagtcaacgcggagcagaataagaaaatgcaggccgcattctgtgataaaggcatcgcattctacgaaaagggcgacgaagaaaaagcgcttacctattttgagtatgtcaccgataaagaccttctcccgaagatcgacgccgcctactacgcgcaggcgttaaagctcgtcgaagacggcgagtacgacaaggcgaccgaaattttcgcaaagcttggcgaatatgaagactgcccgacgcagcttctgcgcatccacgcgctgaaagcggagcagtattacaacaacgccgattacgaaaacgccatcgcggagttcaaggccgccggcgattacggcgacgccgcctcccgcgtcacggaggcgacttaccgtctcggtgcacagcagctcgcaaacggcgaggtgcgcaaagcctacgatacgctctatcccatccgcagctacgcccccgcctatatgctcctcgtctccaattcgcagttctatatccagatctacgacgtaggcgccggccccaaccccttaaatgaaaactaaaacccagcgcccgcagagtcatcttctgcgggcgctttttgtataaaaaacgaccccgagtttcaaactgaacagaaccagtaaaacaggacaatagacaaaatcccccctgatgtaggataataagtacatcaggggggattcattatgagcaaacgaagatacaccaatatgcaggttctactaccgaccatagaaaagatgttagaatcagggaagaaccacagggaaatcgaagcggaacttggcttggagggagaccgtccggttcacaatctgctgaagcggcaacgcaaaaaagccgccaagggtgcgccgaagtttcgtggcaggaagcctgcaaagacgctgcaggaatataagtatgagaataagcggctcaagatggaagtgaaattactgcaggattttctgcagtccacagaaaggaagtgaggccaaaggcaaagtacgccgtcattcaccgtcaccggggagaatacccaatatctgttatgtgcaaattcttcggggtatccagaagtggttactactgctttaaaaagcgtctgggagagacggatcgcgatgctgttgtggcaaaggaaatcgaggaatgtcagcgcaggacagataagacctatggctatcgacgtgtatggaagtggttaaaaggcagaaatattcaaagagatccgaagactgtgctcagaatcatgaaaaaatatggattattgtctgaggttcgccgacgccgccaatgggtaaatcttggtcagcaggtacacaaatacgaaaatctgttgaacagacagttccgggcggtcaggccaaacgagaaatgggtcacggacatttcttacatccacacaaaagaaggcattttatatctgtccatgatccgagatctgtatgacaacagtattgtggcctacaagactgcaagtcggcagactgtgaatcttgttctggacacgattcgtctggcaatgaagaaagagaaagtcgctgcggagttgcagctccacagcgaccaaggctttcaatacacatcgcaagcatacttcaagctaacacaatcttacggcataacgccgtccatgtcaaggaaaggaaatccttatgacaatgccatggcagaaaatttcttctccattctgaaaacagagtgcatctaccgccacaagccaaagacgttccaagaagcaaacgaactgatcgacaggtatatttacttctataaccacgaacgcatccaaacaaaaacgggagtggcaccgctgtcgctgcgccactccgcttaaaactcaatatcctacatgggggcttttagtgctgtccgcataatctggtgcggttcaaaccctcggggtcgttccatcttcaaattatcaataaccttactttccaaaactcccgcgcagcagcatggcggcgtgctcgcggcgcagctcctcgcacagtgcgtaaaggctccatttgtcgttgtgttccgtgtgtacggctttcagcggaatgggcgcgatacccgcttttttgtacgccgcaaggaacacgtccagcatctcattcgcaaagccggagaaaatcagcacctccggcagcttgtagcccgccggggctttctgcacgttcgcattcactttctcgccgcacagcgctgcaactgcgcggtcacggtcggcgttcgtcagccgtcttgccgtcaggtgcagttctctgcacagcgcggaaagctgcttttccttcgcagcgtcttcaacatggtataaaacaagagccatatgtttctccttactcttcacacagcgggcggaacaagtcaccgcggcgcttcatcatgcggtaacgaaggatcatcataatcagcaccccaaagcgtgccgcagattcgatcacgttcaccgtgaagatcgccgtgtcgttcgcgccgagcgccgtgtagaccgaaacgccgaagaacggcagaagcgagttactcagcgtcacaaacagcgtgtaaatgctgatgataagcgcgcggttctttttcggcgtcgcctgcaaaagtagctgtaccacgcacatgttcgtcgcaccctgcggaatgttgccgatgagagccagaatcataaaatacggcatacgcgcgctttgcggcagcaacgtcatagaagccaccgtaatggggcagagcagcaagcccgcgcatacaaaaatgattgtaaaatgctcggatttgcggcggcacagcttcgagaaaaagccgatgaagatcatctggcaaatggaacacaaagcctgaaaaaagctcagctgcgcttcgttcatgccggcatattttgtctccgctatgtaccaaaggctccagtccaggtgccacgaaaggtaaaacagcatgatgcagatgaaaaagccgcggaacggcttgctgcgtaccatctggttcaaagcttccgggaacattttcagtcccatctcctgcttttcttccgccttgcgcggcggacaggggatgcggcgcagcacaagcgcctgcaaaagcatgcatacgcctgcaatataaaagaaaatgcgcagcacaatgagctttccctcggtgtccggcatcagcgtcatgacattgccgcacaaaagcggcaccacaatgcccacaaagaacagacaccggctgcggaacgtgaacacgctgttgcgcaggcccggctccaccgcgtcaccgaagaatgtctgccactgcgcgttatacagcgcaatgccgcccaccgtcatgccgagaaacacaaaaaatgccgtcatgcggtgctcgccgaacagcggcacagagccgtaagcaaaatacgccgcgctcaaaaacagcgccagtatgaacggcaccgtgcggctcgtcttcgtacggttcgcaaggaatcccaccggaatcatacagatgcccgccaccatgttcggcaccatctgcacaaggccgatctgcgtgtccgtcgcgccaagattcgtcgcatacaaattgttcgccagcgagtaaagcgaaacggcatactgcaataaaaagccctcaatgccgaaaaggcacagcatgcgcagtttcggatcagactgcagcgatttgaccggatgaaatgtaaatttacccatagatgttctcccctgagaaaaataagcagcgcaccgaatacacgcgccctatccattataaacgaaaaccgggcaaagacaagccttacccggaattttcatcgttttattttttgtaaacgcatttgccgcccaaatacgtcgccttggcttcaatacggtgcagcgtgttggcgtccgccttgaacggatcttcggaaagcaccacaaagtccgcaagctgtccgtttgcaatctcgccctttttgccttcctcaaatgatgctaccgcgccgctttttgtaaacgagtcgatggcctcccgtaccgtcagcgcttcctccgggcgatacggtgcgtccgttgagccaatgcttcgccgcgtcaccgcgcattccatgccgcgcatcacgttcggctcctccaccggcgcgtccgagccgttcgagaacggaatgcgcgcgttcaaaagcgtcttagccgggtaacttgtgctcgccaattcatcgcccacacgctcgcgcacaatgtgcgtgtcgtagtcgaggaagatcgactgcaaattcacgcgcagctttaattccttcatgcgctcaatctggtcacgccgcacaatctggcagtgcacgatgccatgtcggtggtcgtcgcgcgggtgctcatgaagcgccttttcgtaagcgtccaatacgttgtcgagcgccccgtcgccgatggcgtgtaccgcaacggaaagtcccttttcgttcgcaagagagataagcccgttcaattccgcattcgtgtatagcggaatgccgcgtgcgttctcatcgtctgcatacgggcggcttaaacacgctgtgcgtgcgccgagcgacccgtccgagatgatcttcagcggtcccgcgcggaacatatcgtcttcaaaatacgcatcgccgctctcgatatattcagaaagcgcctctacgttcgtaaactgtgcctgctcgttcacgcgcaccgtcatcagccccggcgttctcaaaagcttctgcaccgtcttgtacggcacaccggggaacgtctcgtagtcgtcgctttggcaagaggtgatgccgtaacggttcagccgcttgcaggaggcgcgcagcattgcacacagctgcgcctcatccggctccggaatgcccgcgtacaccaccgctacggcgttttcaaaaaactgcccgttcggctcgccgttttcatctaaagcaaagctgccgcccgccacttgcggcgtgtccttcgtaatgcccaacacttccagcgccttcgagttcactacgcagatgtgcccgcatgcccgcgtaatgcagatcgggtgttcggtagagacagaatccaaatcccaccgcgtcggaaagcggcgctcgtctgcaaaataatcgtggttaaagccgcgcccctgcacccacgtgccgggtgttacgcccgtttcctttatataggtgcgcagacagtcgagcatctcctttaaagacgtcgtgtgcgcgccgaggttcgccattgtcagcacattgccgaggttcagcacatgcatgtgtgagtcattaaaccccgcgcagacgaattttccgcctaaatcgactacttcatctgccgtggctttatccgtctcgcccacaaagcagaatttcccgttttccaccgcaaaatccgtcacaaagccgtttcccgtgtaaatcgtgccgtttttataaaccgtccgcatattgtctccccgtttccatccgttttctccagtataaaacaaggggaaagcccctgtcaagttgaaaaagcctgacttttcccgcgcgccgttccatcttgtttttattcgtaaagagaaaaatagcgcacggcataatgaaattccatacagcttactaaaatatcaaaaatgaaatagtagatatgtcaatataacattttacaattctatttaatgtgcgtataatacagatgcttccaaatacagtttacaaaaaagtaacaagatatttggtcaatgtcaacaaaaacgtgtgctcttgtgaccgtgtcttgttgctgctgttcacagcggcgaaagatgcggtcgtgtgcccttttggggcgcagcgctgaagggggaatttttgcccggtgatattgaaatggaaggtaaaattttgagaaagaaagggaaaaacaatgaaagcaaagaaaacaaagctggctttgtggatctgcgctattgtggtgctgctcgtcgcaagcattctggttccttcggtgcagaagaccgaaacgattcaggtgaccatgcgtgacgcggttctgcatgagacgaacagaatcagcctctttggcatcaaagatgtcaacccggcgttgatctccgccatggtggtctcgggcatcttgctggtgtttgcggtcatcgtgcgcattttcgtcattccgcgctttaagatggtgcccggaaagttccagatgctccttgagcaggcggtagacctgttcgacggcatggctaagtccaacagcccggggcgcagcggcttcctcggtgcgtacatcttcacggccggcgcgtacattttcatcggtacgctctttgaactgttcggcattcaggctatcacaacggagggctcgcccatcacgcttccggcgccgctgtccgatgtcaacgccgccatcgccatgggctgcttctcgtacctcgtcattctgggcggcggtatcgcgtataacggcttcaaaggcgtgggcagcactttaaaggagttctcgctgccgatttccatgagcttccgtctgttcggtgcgcttttaagcggcctgctcgttacggagcttgtgtattattatgtgaatctgagctttgtgctgccggtcatcgtgggcgttatgttcacgctgctgcacgcgctcattcaggcatatgttttgacgatgctcgtcgcgctctatttcggcgaggtttccgagaagcaggaaccgaaaaagaaaaaagtaaaagcagaagctgaaaattaacctacggagggaaaatatcatgaacgcaaaacagagaaagttaaagaagcttgccatcattctgctggcagtcatcgccatcctcgccatctccattccggtattcgccgcaacaaacggtgatgccgcaaccaccacggcaacagccgaaaccgcagtagaagctgcagccaccaccgcagacagcacaaccggccttaaggcacttgcttccgctattgcagtcggtattgcagccgccggcggtgcagtcggtatgggcctctccgcaggtaaggctgttgagggcatcgcacgtcagccggaggctgaaagcaagattcgtaccaccctcatgctcggcctcgtctttatcgagacggccatcatttatgccctgctcgttgttatcctcatcatcttcgtcctgtaaaggagagtgcagatcgtgaacatcccactgaatattgattggcagcagattttgctgcatgtactgaatttcgtcattttgttcggcggcctgtatttccttttgtacaagccggtcaagaacttcatggcaaagcgcgaagcgcattatgccgaaatggcacagaaggcccaaagtgaactcgattccgccgaaaagatcaaggcggattatcaggagcagctcaagtccgttgagggcgagatcagcgcaaagagaaccgaagcgcagaaagagctcgaccgcagcgtacagcagcagctttccgatgcccatgcacaggcggataagatcgtcgccgatgcgcagaaggatgctgcccgtgtacatgataagatgatcgcagacgcacagaaggagcttaccgagctcgctatggaagcgaccaagaagcttgtttataaagacggcgatccgtatgacgcgttcctcgatcaggcagagaggggagagccgaatgcgtaatgcagatgaaaaggccgtagccgttctccgcggcagccgccgcccggatgccgaacaggaaaaacgctttgcggaattcctgctgcgtacctatggccgtgagattccgctcacctttgaagaagataaaatgctgaacggcttcacgcttaccgtcggcaccgatgtgtacgattggagcctcaaaagccgtctgcgccagtttgaagaaaagctaaaggcgttaaagtccggcagcgattccgtcattccgctgatgaaggaagccgttgaagattttaccccgtccgcagaagcggaagagaccggtacggttctcaccgttggcgatgagatcgccgttgtcagtggccttgagcatgccgcctacggcgagattctcctgttctcctccggcgttaagggcatggtgcaggacctgcgccgcaatgagatcggctgtgtcctctttggcgacgatgccgagatcaccgagggcagccttgtgcgcagaagcggcaagaccgccggtatcccggtcggcgacggcttcctcggccgtgttgtcgatgcactcggtacgccgatcgacggcaagggtgacatcagcgccgagggctaccgccccatcgagtgccccgcaccgggcatcatcgaccgccagccggtcaacgcgcctatagaaaccggtcttctcgccatcgattccatgttcccgatcggtcgtggccagcgtgagcttatcatcggcgaccgccagaccggtaaaaccgccgtcgcgctcgataccattttgaaccagaagggcaagaacgtcgtttgcatctatgtcgccatcggtcagaagtccagctccgtcgcacagcttgtggagaccttaaagcgccgcggcgccatggattacaccatcgttgtcaacgcatctgccagtgacccggcttccttgcaatacatcgcaccgtatgccggctgcgcactcggcgagcacttcatgtatcagggcagagatgtcctcatcgtgtacgatgacctttcaaagcacgccattgcgtaccgtgcactgagcctgcttttggagcgttccccgggtcgtgaagcgtatccgggtgacgttttctacctgcattcccgtttgttggagcgctctgcgcatctttccgatgcactcggcggcggcagtatgacggccttgccgattgttgaaacgcaggcgggcgacgtttccgcttacattccgacgaacattatttccatcacagacggtcagatcttccttgagagcgacctgttcttctccggccagcgtccggctgttaacgtcggtctttcggtttcccgtgtcggcggcgacgcccagacaaaggccatgaaaaaggcagcgggcggcatccgtctggaccttgcccagtaccgcgaaatggaagttttcacccagttctccagcgacctcgacgagaccacaaagcgtcagctcacctacggtcagagcctcatgcgtctgctgcgtcagccgcagtaccatccgatgagccagcacgatcaggtcatcacgctcgtctccgccctgcaccacgtcatgcaggacgtcccgcttgatgatatgggtcgtttccacacggagctcatcaagtacgccgagaagaatatgagcgatgtctgccgccgtgtcgataccaccggtcagctttccgatcccgaccgcgaagagattttgaaagtcgcgaaggaattcctcgaaaagtacaaggcggaaaacccgcagaacgcgtaagcgctcggaaaggcggttttcgctatggctaatacaaaagagattaaaaccagaatcgaaagcgttaaggatacgcgtaaaatcacgaacgccatgtaccttatcgcttccacaaagctgcgcaaagcacgcaacgatctggaccgcacgcgcccgtatttcgaggcgctgcgcacggagatcaagcgtatcttccgtacccagaacgatgtggacagccgctacttctatccccccgagggcgagccgccgctggagggcacctacgcgtgcctcgtcatcacggcggataagggcctcgcgggcgcatacaaccagaacgtcatcaaggaagccatgcacatgctcgatgagcatcccgatacgaagctctacgttgtaggcgaatacggccgccacttctttacgcagcacaatatccccatggagcacagcttcctctatacggcacagaaccccaccatgcagcgcgcaagagaaatttgcgacatcctgcttgagggctacgaccgcggggattttaagaagatttttgtcatttataccgatatggagaacagcctcacgtcctctgcacactgcacgcgtctgctgccgttccaccgcgcctatttccagacggatacggtggaaaaggcggtcaccacgccgttcgagtttgtgccctccgtgcaggcggttctcaacaacatcatgcaaagctacgtttcgggctttatttacagtgccctcatcgatagcttctgcagcgagcagaatgcccgcatgacggcgatggattccgccaacagcaacgcggaaaagctccttgcagagctttccttgcagtataaccgcgtgcgtcaggccgccatcacgcaggagattacagaggtctccgccggtgcgaaggcacagcgtcaaaaacacaggaaggaagcgtgaacaacgtgaatacaggtaagatcgtacagatctccggcccggtcatcgacgtacagttcgagtccggcgttctgccgaaaatcagagaagccctttcgcttaccgtggacggacggcggtatgtgatggaggttgcccagcatgtgggtgacaacacggtccgctgcgtcatgctttccggcagtgagggcctttcccgcggtatgcaggttgaggctccgggcaaaaccatcgaagtgccggtgggcgaaaacacgctcggccgcatgttcaacgtgctcggcgatcccatcgacggcggcgaagccgttcccgcaaccgagccgcacaaaagcatttacagaaaagctccgtcgtttgacgagcagaacccggccgtcgagatcctcgagaccggtatcaaggtcatcgaccttctggagccgtacccgaagggcggcaaaatcggtctgttcggcggcgcaggcgtcggcaagaccgtccttatccaggagctcatccacaacgtcgccatggagcacggcggttactccgtgtttaccggcgtcggcgagcgtagccgtgagggtaacgacctctggcgtgaaatgcgtgaaagcggtgtcggcgataaaacggcgctcgtcttcggccagatgaacgagtccccgggcgtgcgtatgcgtgtcgccctctccggcctcaccatggcagagcatttccgtgacgaagagcataaggacgtcctgctcttcatcgataacatcttccgtttcgtgcaggcaggcagtgaggtttccacgcttctcggccgtatgccttccgccgtcggttatcagccgaccctcgcaaacgaaatgggcgagctgcaggagcgcatcacctccacaaaagacggctccgtcacctcggttcaggccgtttacgtgcctgccgatgaccttaccgacccggccccggccacaacgttcgcccacctcgacgctacgaccgttttgagccgtaagatcgccgagcagggtatttaccccgccgtcgatccgctggagtccacctcccgtatcctcgaagccgacgttgtcggcgaggagcactaccgcatcgcgcgtgaagtgcaggaaaccctccagaagtacagcgagctgcaggacatcatcgccatcctcggtatggacgagcttagcgacgaagaccagctcaccgtgcagcgcgcgagaaagctccagcgtttcctctcgcagccgatgcacgtcgcagaaaagttctccagcgtgccgggcgtttacgtcccgctcaaagagacgctgcgcggcttcaaggccatcgtagacggcgaaatggaccagtaccccgaggcggcgttctataacgtaggtacgctcgaggacgtcatcgcgaaagcgaagcagctagaggcggaggcgatctgatgcgtacatttcagatgcacctgcttgaagccgataaggtctttttcgagggcgagtgcgagtcgcttgtcgtgcccacaacggtcggccagtacggcattctggcgggtcacagcaatatgatctccgccgtcgtgccgggcgtgctctcttaccgcgcaccgggtaaggagtggcgcaccgctgccgtttccgagggcatggtgaaggtcgagggcaacgatatcctcgtgcttgtagactccgccgagtacccggaagagatcgatgccaaacgtgcacagcgcgccgccgatgaggcgaaggaggccatcctccaaaagcgcagcgtgcgcgaataccgcactgcgcaggcgaaccttgcccgcgccatcaaccgcctgcgcgtcaagaaaaacgcgagataaggcggcaaaaaccacaccgaatttccaaatatgcaaaaagcgttccgagcattcgggacgctttttgcatatttcacacaaagggtttgcttttttcatgaactttcgaaatttcgcaaaaactgcggtacaaaacggcggaatgtgctataatgaacgcgaataccggcggaaaagtacgccggaaagttgtattgaaattcagtttaaaggagtcaaaagcatgatcaaagtcggttttatcgattactatttagacgagtggcacgccaataactacgttcacatgctgcgcgattactcaaacggcgaggtagaagccgtgtacgcctgggctgaaatcgacagccccgaggacggcctcacaacggacgcatggtgcgaaaaatacggcctcacccgcatgatgacgcaggaggagctcatcgaaaagagtgacgttctgctcgtgctcgccccgcgcgacccgaaaaagcacgaagaactcgcaaacctcgcgctgcgctccggcaagcgctgttatgtggataaaaccttcgcgccggatcacttcgctgcaaagcgtatgctcgaccttgccgagcagagcggcacgccgtgctggtcgtcttccgcgctgcgttttgcggaggagtatcaggcagcggataaaacgaacatcaagggcgtcaatacatggggtccgaacggttttgaggattacgccatccaccagctggagccgatcttcatgatgatgcaggctcccgcgacggaagtcatgcacctgacaaacgacgaggtgtacaccggcgttctgcgctttgcggacggccgcaccgcaacgctttccggctacgcaaagggctcgccgttcatgatgaacattgcgcgctccacggaaaattccgtactggaaatttgctccgattacttccgccacttcattgaggcgctcgtcgagttcttcaaaaacggcaccatccctgccccgcacagcgagacgctctccatcatcagcgcctggggcgcccttatggaagccgaaaagacccccggcatctgggtcaaagtcccgaaggactgagtttgtcactgcaaaaaccgtcacaacgcacgcatctttgactgcaaaaggcttcttccaaaagcgcgactatgcggccattaaagaacagcaagtagagcgttacggcgtctggctcacgaatttcgttatgataaaaacgatataaaaaagatagtctttctaagcgaaacgaacgctttgaaaggctatctttttctatgcgtgcgaaaatgtacgtttatttcttcggtttcggcgcggcggggtcggtgagttcggggagcgcgccgccggagaccgcccagaaatataaacttgcgatgctgcaatacggtgaaaaacgtttgcggtaccgctcgaaccgtgcgcggtcgatctccttgtggcggtagaccatgcgcatgccgcgcaaaatggcgaggtcgccgtagctgaacacattcgggcgctgtaggcagaataaaagcagcatttccgctgtccacacgccgatgcccttgagcgcgctgagctcgaggatgacctcttcatccggcttttcgacgatgctgattaaatcaaattcgcccgtatgtacctttttcgcgaagtctgtgatgtattccgccttgcggaacgaaatgccgagcgactgcaaatttgcttcgccatagcccaaaacgtgttcggcatcgaccgtgccgagggcgttctgcacgcgcgcccaaacggttgcctgcgcctttgtggaaatctgttgccccacgatgtggtgtaccacggcggaaaaaaggtcgtcgtccacggcgcgctcaatgtgccccacgcggtcgatgaccgccgagagtttcttgtcctttttccgtaaataagcgagctctttttcgccgtacggaaagtactttacgtcatccatcaatcgatctctcccggagtgcgcgatttgatcatcgcttccagcttttgcagctcggtaatctcttgcggagtcagcttttccgtatagccggtctcgagcttttcaagcatggagcgcattttgtaggcttcggcgggctgacgcagaatttcgcgctcgcttttaatctgttcccgcgcggcgacttcgtcgatgatctgctgcatgtagcggtataagttgctccgttctgtataatccgcaggcgcgtagaaatttaatcggtcgtcgttatacagtttgtatactttggcgcggttattcttctccgggtcgtatacgccgacggagtagccgcctttacttttcacgagccgcatgcacggaatgtccgtggcgctgtcgccgatatagacgatgttctcatacggaatgcgcaggttttcctcgggcatgctgtcgtttacgcgctcgtcgtactcctccaaaaagccttttgcaatgcggaaaatgaactgcgtcttgttcgtgtaattgatggcctgcgcgggccactccgctacgccgtccgtggtgtagaggtaggaggaggcataaatgcgtttgaaattcttcgcgatggcgctgccctcgatgatttctttaagacccgaagaaatgatgtagtgttcgagctcgatgccgcgctgcgcagcatacgctgtcgtgcgcgtgaaccaatccgtaacgccgcggtacagctccacctgcgcaccgatggcccgaaaatactcgcgttttaaggattttccgagaaagcgcgaatagcgaacaagcatgaacatccacgaaaggttgctttccatgctgttttcccgcgcgaatgcgtctgtttccgcccagaatttgtctttgtcaatgccaaaagacgggatgagcgtgaacgtctgcatgtcgtccggggaaagtgttttgtcaaaatcgtagcagatcgccatgcgcggactgttctccgtcatgctgccgccccctttctgtatctcattatagctaaaaacgtttgttctgtaaagaggttttgagaaagttgtccgccgatgtcctatactgtcctgcaatgtccggttttaacggtaaaagaacgccctcatccgccgcttttcgcagccgatgaaagcgcttttcgagctgttccgccgttttgatgcccggcgcatctttggctttattcgcagacttttgggcatgtcacgtccaaaagtcaagtgttacgatttgctttctaaccacgccctccgggtggagggcgaccttggctgccgccctgtaacaaaggagggcaactatttctatccacgccctccgggtggagggcgaccgctaccccgaacagtacgatgcaaggtttgagatttctatccacgccctccgggtggagggcgacagtatgcgggaggtcgtgacgctcaaggagtattatatttctatccacgccctccgggtggagggcgacgtaatttacattttcattttcgttttcgtaccctccatttctatccacgccctccgggtggagggcgacgagcgccgttttttgcactctgctcgatatgccgatttctatccacgccctccgggtggagggcgactgcgccgcggaggatgttgatttcgcttacggcggatttctatccacgccctccgggtggagggcgactgctccccagaatgtttagctaaataccgattaatttctatccacgccctccgggtggagggcgacaaattctcatgaggctttcccagctgttgtccgaatttctatccacgccctccgggtggagggcgactgtcgttctcgtcgcactcttcccacggtgtttcaatttctatccacgccctccgggtggagggcgaccgttttgcattagtaaagatatttgtgtttataatttctatccacgccctccgggtggagggcgactctcccattccatgtttccaaggacggcagaaacgatttctatccacgccctccgggtggagggcgacaagatagcccctttcgtaaagcacttgcattatatttctatccacgccctccgggtggagggcgacaaaagcatttttgatagactccgtcgaagaatacggaatttctatccacgccctccgggtggagggcgaccatcagcattccacccgtatacgcccgcggtgtaatttctatccacgccctccgggtggagggcgacaatacgctatgcgggtattgactatggcgttcgcatttctatccacgccctccgggtggagggcgacgaacatatcacgttcaatgatttatttaaataagatttctatccacgccctccgggtggagggcgacgcgacggagagggggataagcttgtaactgtcacgatttctatccacgccctccgggtggagggcgacctttcaagcaattccacaatgtgtcatatcagcgtatttctatccacgccctccgggtggagggcgacaacaaaaccgtaaaacaactgtttatacattccgtaatttctatccacgccctccgggtggagggcgacctgtgcgtttcctcaagcttgttgatataccaaaatttctatccacgccctccgggtggagggcgacagcaaaaacggacaaaattttcgtctgtttttgcgaaaaagggagaagaatttgcctctttaagacgcggaaagagaaaaatttgccggtggcgttttaaaaaggacaaattttgggttttgatttggtgcgaaggaagcaggaaaagcgtgtgcgctttggcttcgcactgcgggtaatcagatgagcaggacggaatcctgcgcgtaggcgggctgtacgccgacatgctctacattttgcttatattgattgccgaggcggtaaaaccgcaggctgtccgtttcgggctcgatgagcgcggtgagctctgccttcagtgtaacatactgtgcggcggtcagcaagcactcgaaaacggaattttgtacgcgctgcccatggtccacacactttttagcgactttgcggagacgctttttcccggcggcggtctccgtgttgacgtcgtaggtaattaagaccagcattttgacctcacttccagaaaaacggcggatacgcttccagatcgccgcgcagagtgcgggcgagcaggagtgcctgcacgtagggcacgagcccccacggaatcttctcttttaaaaacgggtgcgtgatttgctcctgctttttgctttgccatgcgccgagaaatgcgcggcgaccgtcgtccgttaaaagcacggcaccgctttcctgcttttgcaggtgctttgcggtgataatcttgcggttcacgcaggagagcacaaagcggtcggcatacacggcgcgcagctcctccatgaggtcgagtgcgagactgcggcgaccgggtcttgggcggtgcatgaagccgatgtacgggtcgagcccggcactttcgagcgcggcggtgcagtcgcgcgtgaggagcgtataggcgaacgaaagcagggcgttgatgttatcgagcggtggtcggcggctgcgcgaggtaaaacggaagtcgctttgctgctgcaaaacgaggtgatcaaacacaccaaaatacagctttgcggcttcgccttctaagccgagcagctgcgcggggtcttcgcaggaggcgatgagcggcaaagactgtgccatttgtgcggcggctgttttaagcgttttcacgggtacgcgctgggggtggtcacgcgtggcgcgctctaagacccagcgggcgttatagaccttgccgaggatgaacccgcgggcgtagcggcagctttgatagggatcgtcggacacgcgattctgcgtttgccgcaggaggacattgccgtgctcttcgccgacggtgcgtgccaaaaactgcccgcgcggggagaaaaacgcgatgtccacaccgcgctgcacgcaggcacccatcaaggcgggacttgcgccggcgtaggagaaacagagaatgccctcgagcgtgtgcagcgggaagcgcgcgacttccttttgctcgcgactaatgacgacattttcgccgtttacggagagatacgcatcttcgctgagcacgaacagggtgttgagcagttgtctcacggggtatcctcctcgctttcaaaaatgtgggcgcgcaggtatgagacggggtctgcacggctgcacagcaccggcaggcaaatcgattttaacgagcaggcgttgcagtgcttgccgggtttgacttttggtgtgtagccgcgggcgaaatagcggttcatttcggcagcggtgtcttccgttttgcggcggagttcttccgtgaacgggacaacctcgcggcggcgcgtttctatatagtagagcgcgcccgcagggataccgcacacgagcatttcttcaagtgccatggcttcggcgcagagctgcaagcagtcggcatcggtctctttttcgcggccgtgcttgtactcgatggggtagggcagccaaaatccgggctgcccctctaaagaaatgccgtttttgtctttatgaaactctacgacgtcgcacgcgccggagaggttcaatttacggctgaacacgcgcatgccgcgcacggtgaaaacgttgtcgcgcttttcggacaacgtttcatcgtggcagcggacgtggtcgagctgcccctgtgcggtgcgggcattttcctgccactgctgctcgatgtggatgagcgcccactggcggcggcagaacgcgaagtgctggatgccggacattaaaagtccgtcttcacgcgcgtccatttaggaaagacgttcgcaggtgacgccttcgggcaggtcttcggaaacggtgacggtgtaatcggagaatttgcgcgggacggctacgccgtcgacctttttaaccgttacggcatcgaacagcttataggaagcggcgttgccaagctcggacgcgtgcttgaagatgatgagctcacgcacggccattttgccgcgggcggcgctgtggtcgttttcaaacatattgagaatggcctgccagagcatttgaaggtcttcttcggagaagccggtcacgcggcgggcgaggttggcggaaacgaagccctctgcgcggtaaagaccgtagggcacgacgtatttgcggcccatttcggtggttttgttctgggcgtcggattcggtggtgatggcagtgcgggtaatggtgacctcctgcggcacgatggggtcgatggagcgggcaaagccgagctgcaccgggccgcgcacctgaccgcaatttaaagcgccctttacgaatgttgtcatgactgcgccgaatgtgcggatgtcgaaaaactcgctgcacatgaagtcacggagcttgaggtcgatatccgggtcattgctgcggagcttcgtcacaatctttttggcgtccttgcctttttggatctcggcaagctcttcgccgatgccgagcgcttcgccggcttcgaggtcgctgcggttgagcggcacctgatccttgatataaatgcgccagccggactcatcttctttgacatcctgcacatagttgcggatcttgcgctttaagcacacatcggttatgatgccgttgccggtttccgggtctacacgcggcatattgccggcatcggggtcgccgttggggttgccgttttccacatcgaataagatcacgaaatcgtagcggttttgaatgggttcacgcatggttatgcctcctctttctgttcggtggtgtctgtctttttcttaaaatattcctgacgctgctggtagtagccgagctggaacgcgccctgttctgcgagcataagctgctttgggaaggtttcgccgagcttgtccgaaagttcgccgatggatttatccagtgcaatccgctgaccctcgttgagctttgcgaggtgcttctgcgctaaattgatgagcgtggggaacacaaggctcggcgtagcggaagcagagttgaaaaaacggtctttgatggtggtgttgatgttggggtttgcggcttcctgtgtgcgctccaaaacggcgaacaggcggccgagattgtaggggatattggtgctttctttgtttacggacacggtcaaaacctcctttggacaaagcgggtcttcgtttttagaataataagcttttatgacggacgcgcgcgcccaggtgacatcgtgctcggcgcggatgcgctgcacggtgccgtttagtaaagtggcggggtagcgcgtatcgtttaagatggaagtgagcaggtcgccggaaaggcgcgggaaggatttttgcagctcttcatcggcttttttccagtctttggaaaagcggacggcagagcgcgcgagggtgtagggccaaagcgtgtcgaatttttcgtaggccgggcgggtgatctccaaacgctcgtaatgggcgttcacgtttttggcgagctttgtgaaggtatcctgccagaaaaagcgaacggaaagacgcgcggcgttcggcgcgagccccagaatgtaaaagtgtgtatcggggctgaggtgcatgtcctgtaggtcggctgttctgccggatacaagtttttgaattgcgcctaaaatgtcgttttcgctccaatcggactgctcctgcggaccgaaaagcatagctcccgcaaatgcggcgatggcaggatcggcattctccacccaatatacgacggtgacgtcgccgatgcggcggacattatcactgcgcagcaggtagtttagcgcctgcgtgtaggcggtcatggcgtaggtgctgacgggagcgttctcgccctgctcgtgcccgtaggagcagaaggcatcggcgttgaacgaaacgagcgatgcgccggagctttgtgcgccgcgcacgccctgaatgttgccgtgcagacgcgcggcgggggcgagcctgccggtgacactgcaccgggtgggcgtgtcggaatctgaagcagaatcataggcctgctgccacgcggcggcgatgtcagagtcgtttgccgcgggcttattgttataataaaagatcagattgccgcccttataaatttccgaaagatagggctgcaaagcggggtgctcgacggcagagggggaattccaggtatcgaaaaacgcacggacggccgcggcagcctcaccgggggtatccttcaaaatttccagatgtttttcgcggctggcttcaaagcaagctttggtgcgctcgggcttacccttgtcgtccacgccgagcaggtaggaagacgtatcacacagaaaatttgccgcaacaccggaagagcgcttgacctgtgcgggcacggcgagctgctgcggcagcatctttttaccgtttggagagggcttttggaggggagaaacatcgaaaagggaaccgtccgggtttaggtccagacgccagctgacattgactttgctccagcccgggcggtcgatctcaccgcgggcaaggagcgcttcgtaatactgaactaaggcttgcaggatcatctgaacacctcgcagccggccacctgaatgacaccgtgctccattttggcacggaaatacaggggcgtgatattttgtgggtcggaataatcgaaatcgtacagcataaagccgaggtcgcgcgtctcgtcaatcgtcgggatcgggccaccctcccactgcttgaagtgtgcgggaaactcgcggcagccgaagtacggggtggaaaagcactggccttttctcatgcggcgtgtgacgatgtcctgaaacttgccggggttatcgccgggtgcggctttttccggcagcatctcgaactccgcttcgatgacatagtggacgttcgtcagcaccatggaggcgcgctggacgatttgtttcgtcgtgacgaggtacggctcatcttccttgccctgcgcgatgcgcatggcggtgctcccgagaattttgctttttacctcgttgcgccgaatggtggtgaactcgatggggttcaaaacgtagatgcggcggatatgccagcgtattccggggtgataatacagactttcaactataccgcgcgcggcggacggggtggggacatcgtagcttacacgctcgactttcatctctccgcgtgtgaataacgcatacgggccccagacttccaactgaatcaataagatcaactcctttcaaaattcaattgatgttgttttgataatacaactatataacgattatttgaacttgtcaagataaaatttgagtttagtctattttttacggaacttataaagcataatttgaatacgtattgctttaatacgtatcatatggtataatagatttgaatcaggaggggaattgaaatgccgaagaagccaaaggaactggaacggatcattttagaagacggctgggtgttcaagatgcagacgggttcgcaccgccattatacgcacccgacgaagcccggcaaggtcaccattccgtttcattgcaaggacattccgaaaggcacggaaaattccattttgaagcaggcaggtttgaaataatctcccccgcttccgcttagactatatcaggaggtcgattttatgctgtcagcttatcccgcttgtttttttaaggaagaaagcggttattctgttgttttccccgatctgaacgatctgtctacctgcggcgaaacgctcgatgaatcgctgcgcatggcggtcgattgccttgccgggtatctgtactggctgaaaaaagacggtgaagccgccccggcgccctcgtccgtggacgcgatccgccttgcagatgtcgccgccgagctggaagtgtcgatggacggcgcgttcgtgaacatcatcaccgtggacgtggaagaatacgccaaaacgcactttgaaaaagccgtcaaaaagacgctgaccattcccgcgtggctgaacaccgccgccttggagcagaacatcaacttttcgcaggtccttcaggacgcgctgaaagcccaactgcatatgggataaaatcaagttaaggtcgctgtctgtttttacaggcagtgtgggtagaaataattgttgttgatttgtatagagaggtcggtaagggtttgccttaccggcttttctattttatataaacagagcggtttcggtttggtcgagggtgaggccgagggcactgtcgtagcggcggggatcggcgaggacatagagcgcaccgccgtcgatgctctgcacggcgccggcttcgcgcagggcagcgagctgctgcgggtagacgttcacgctgtactgcccgagctttctgaacagggtgcggctacgctcgccatggtacagtcgctcgacgagggcttcgccttggtcgatcgggatatacacgggcgtggtgcagctttcaatgacccgtaccttttccgcaacggaggcgaacgggagcatctcgttttcgaacgctaggagaatcttctcacggtcgagatcttctttgccgtacaaatcgcgatagaactcaaaatacgcgcggattgcagctaacgaagtgatgtcctccatgcgttttgaaatgttcttcatggctgcggcgggctggcgcatgtagggcggcggggtggtgttctggacggtgaagacggtcacgaggctttcatctaacgggcgcttgccctcgcgattgcagcggccggcggcttgcaggacggaatcaagcccggcttcttcgcggtagacgcgcgggaaatccacatcgacaccggcttcgatgagcgaggtggaaacgacgcggcagggcaggccgatttttaggcgttcgcgaatttccttaatgcgcgctttgcggtgggcaggacacaggtgcgtggtgagacagtacgcaccgtcttccggcagcgcctgatagatcttctgcgcgtccgcgatgcggttgacgatgcaaagcacctgcggcagcgcgatgagctcggcggtgagcgattctgtgctgtcaaatgtgtgctgcgtgattttcgtgcggcggaaggtctcgaaattttcagggacattgggacagatctctttgatcggcaggtcgattttcaaatcggcaaaaacaccgtctaacgcgggctgcgtggcggtgcacaggacgacaatgacgccgtactttcgggcaagctcggcaagcgccgccgtgaacggctttagatacggcatgggcagcgtctgcacttcgtctaagatgagcacgctgttggcgaggttgtgcagcttgcggcagcgggcgggtttgctcgcaaacagggactcaaacagctgcacggtggtcgtggcgatgacgggggcgtcccagttttctgcggccagcattttgcggtactctgcggggttcgggctttcggaaaagagatattccgcgctgctgtggtgctcaatgacgttttccgtgccgaagattttttcaaacgtatcggcgttttggtcgatgatggacgtgtacggcgcggcgtagatgacgcggctcatgcggttttgcacggcagcggtcagcgcaaatgccatggcagcggtcgtttttccgccacccgtcggcacggtaagcgtataaacacccggtgcggcggtgctgccggaggctttgcacgcatccaaaatggcgcagcgctttcggttgagctcggttttgggcggataccacggtgcgatgtacgtttccaagcggtcgagcagcgcagggagcgcatcgtagttgccgcgcggggcaagtgcgccgtccataaaggtttcggtgtcgatgaaatcggcatcaacaaggcaagaaaacaacatgcggatataaaacgagagccgaaacccggtgttgaattctcgcatgttaaagggcttgaccggcggcagagtgacttcggttttccaatcgtcatacggttcgaggtcgcgttttaagcggcccgagagggtagcgtcgtttttggtatcggcgcgggagccgaaattcggtatgccgccgtgatggcctgcgatggcgagcgccagatacccgacaccgtgcgcgcaagcttcttttgcgccggccgtggagtggtctacgcgcacgccgccgtctaatcgatgctgaaaggcatcgctgtacttgccgatgtcgtgcagtaaaccgagcagatatccgtcttcctccgcgccgaatgcggcggcaaactgctttgcaagctctgccgtgccggtgaggtgttcgtatacggtttgctcgcgggaatgatcttcacttatatgtgccagctttttcgccataaaatcaccttttcgtctttgttaagaccatcatagcacgggaaaagtacaatgtaaatatgctaaatttgaagaataggtaaggtgagcggaaaagcgacaggtgagggtggggtagaaaatcatttgcgatattcggaaaaatatgtatttaatgtttaatgagaagctttgaggtttgcatagagaaatattgacaaataagaactgttacgtcatactttaaataagctgaaatcggcagaaaaggagagaatacagttggcaaagctttttgatacggcggatgcagagcggttgatacaggaacatcgcatgatgctggaagaactggatgagattgcacagtacgaagacaacgtgcagatagatattgaaaaagcagcaaatctggtcgtgacccgaaacgtattagacgtgcttcgagatattccggtagaagagatcaatcgtgaaaaaggcggatttagagtgaaagcacttcgagaccacggatttcgttcgatcgcagatattgttgcggccaatgtgtattcgatcagttcggtgcatggtatcagcgaagatgcagcgtattccataaagcgtatagcgaatgatatggcagacaaggtgcgagaaggcgcaaagatcaaactgaatgttgataacaaaacgcgggaatcgacagctttagtgacagcattatctaaatatggttatgcgagggaaacggcaaaagaatgtcgtggcttgattactgagaatagaagacaaatcgaatatgcgatagaagatttgttattatctcagaaaagattgaagtggatatttgcatcatcggctaaaaaacaaaaagcagtggatgcatatgaatttttggattcttatagaaatggaaactatggtcaaagagtccgggaacaaaggacaatatttgaaaacacaaagcggatcaacggaatagatgcttggaaagaattttccgaacattcggtttcgtttttcaatgctcttgaaaatattgtcccgggaacactcggtaacgatgattcaatatacggactgccggaagaactcgcaagagaagtacaagaggaatgtttttttccggatggtttgctgtgcgagcttcgtcgttaccaggaatggggcgttaaatatgcactgcaccaaaagcgcgttcttctcggagatgaaatgggacttggtaaaaccgtacaagcaatcgccacgatggtatctttgaaaaacacaggggcatcgcattttgcagttgtgtgcccggcgagcgtcgttacaaattggtgccgagaaattcgtaaaatgagccgattgcaggttgtaaaaattcatggtgcgggcagaaaagaagcactgaattcatggataagcgctggtggtgtagctgtaacaaccttcgagacaacagcacattttaatttgccggaatcgtttgagctttcgcttttggttgtagacgaggcacattacattaaaaattcagaggcaagacgtacggtgaatgtgaagaaaatctgtgaacgtgcagagcgcatgctgtttatgacgggcacggcacttgaaaataaaccggaggaaatggttgcgcttatccatattttatgtcctgatattgcattgcgaatacagcacatgcttgctttgaccgcggcgccgcaatttagagaggcagttgcgccggtttattaccgcagaaagagggaagacgtactgacggagctccctgaacttattgaaagtgaagaatggtgcacactcggacaggcagaaaaggatatatatgaacaagcggtgttcggtaagaattttgcagaaacaaggcgtgtgtcatggaatgcagaaaatataaaggattcctgcaaagcgaagcgattgatggagctgatagaagaggctgaatctgaaaagcgaaaagtgattatattctcgttttttctggatacgatccgaaaagttgtgcagcttttgggtgaccgctgtatgaatccgataaatggttccgtttcgccgcagcgaagacaagagatcattgacgattttgataaggctcctgccggggcggttttggcagcacaaatacagtcgggcgggacaggtctgaatattcaatctgccagtgtgattattttgtgcgaaccgcagcttaagccctctattgaaaatcaggcgatttcaagggcgtatcgtatgggccagacaaggaatgtactggtttatcggttgctttgtgagaattcgatcgatgaaagaattatggatatattaaaagataaacaggaaaaatttgatgcatttgctgacaagtctgttgcagcggcagaaagtataaaaatggacgatcatacgatcggaaatataatagcggaagaaatcgaacgtatcaaagccgaaaaagatcagtcaaatgaaaaatgataagagccccgtgcaactttgaagccgcacggggcgatgttgtcgttctgctgaagcggacaaaaccaaatgccccgagcggcattgcttccgctcggggcataatcttaatatttgcgtttaagcctgaggatgattgttgtcacagttggggcacttgccggcttcgttcaacggcgaaccgcacttgccgcagaatttggctacgggtgcgctctgcgggacttggggctgcgggttctgaggctgtgctgccttagaccgaagctgctggcgcaggtcgcccatgtcgggggccatgaaaatgccgttcttctcttcgtttccgttctggctgcggagcttattgttgatggagattacgtttttcagcagcaagactgccatcatcaacagttcatacaccagtcggatcataatgggtccgaggatcatggtcaggatgccgtagacgcccagccagtggcgattgccaaagtagtcttcaggcgcggcaaagagcatgaagaagcccagaatgatcatatctgccgtgaagaaaatgtacagagcctgcagaattttctctacgatcaggtacttgaaattgcaggtatcgtggaggaacttgccgaaagcattgagcttttcgcggcgtttttcggggacgataaacacataggccaaaactgtggcgacgatagccaaaattccgccgacgatggtgaatataccgagctgctcgattgcatcactataaatattcatgttgtacctctctctttctttgctgtaatgattaggtaaacgggtaccctctaagcttaaaatagcatacctctaaatccaaaatttgtcaagattcagattcatatggaacgtttaaggcagagcgctttccgagcggtcgcagggtgaacttgctgcgctggtatcaaggaaaagtccaccgcaatttcacgaaaattgcggtggacttttggcaaatttgaaatttagacggatacctctctcgggcttccagccggtgtatctcgtcgtcggcaatggtctgtacgattttaaaaatcggccctttaccgttgtgggtcactcttatgatatgtggctttgggctgcgtgtcaaacgggcgcttcgatcaatcgttcaccgttacccaacgtccggtttccgccgaccgtttcacggcatcgcaaacgcgttccactcgatacccttctgcgaagctggtagacggctgcctgccttctaccaccgctttgataaactcgtaggattcgatggatttcaattcgccgtacccaatgttcattccgggaatgttccaggtcacttccccgtgaaaatgcgcggggccggtgtagattgtcttaaagccccttctgtcgtcggggtcgccggccaaacacacctgcaactcgttgagtcgctcgtagttgaagtagaggctgcccaaagtgccgtgaagctctaccgtgatgaagttgttgcgaccccaggcgtttctcgtggcctcgatgctgcctaccgcgccgtttttaaacttcacgaggaagctgtcctcatcatccacgtctacggccttccgcttcgcggcggctccgagctttacggtgcctagcaggtctgtgccgccttcctgcaccggccgctcggtgatgtaggtctgcatcatgccggttaccgcctcgatgtcacccgccagatactgggcgatgtcgatcacgtgtgaggcgatgtcgccaagcgtccccgcaccggcgatgtctttctggaaccgccaggagagcggggaggcaggatcggccgaccagctttgcagataggtgcaccgcacgttgaggattttgccgatggatccctcatcgatgaatttcttggcgaggtcgatcgccggaacgcgcctgtactggtaggcgttcatggcaatgatccccttttgcgccgctttctttgcggcctccgccatggccttcgcgtcctccaatgtcgaggcgatcggcttttcgcagagtacgtgcttccctgcgttcagcgcagcgatggcgatttcggcgtggacgttgttcggcgtgcagatgcttaccacgtcgatctcgggatcgttgacgatgtcgcgccagtccgtgcagcatttttcaaagccgaagcgttctttcgcgtccgccgcgatttccgggacgatgtcgcagattgtttttaaaaccggcacggccggggccggccagaaatacttgggcatgtcggaatacccgattgagtgcgcttttcccatgaacccggcaccaaccaggcccacattcagttttttcattgtaaaatcctcccattctaagatgccctcctgcgccgcgcgccgttgaccgacgccgcggacgggaggaattttagatcagcttgccttgcaggaaacggtacgatgtccggcaggcttcttccgggtcgccggcaaagccgtcagcctccaccagataatctcctgcatatcccttttccttcaggaaccgcagaaccccttcgacatcgacgtgcccagtgcccagcggggcaaatccgttttcgtccaaatccttcaggtggacgaaggagattctgtcgtaatactttttgacgatctccagaggatctccgccgccggcagccagatgcgccagatccgggcagatcttgatgtcgctcaccgaaaagagtcggtcgatctgctccggcttttccgccatggacccgaggtgcgggtggtagcttgcctcgatgccgtgggcggcgaagaccttttctgcctccttcagccctttggccagaagcgcatagtcgcccgtctggacgcctctcccacgtatggcaccgccgcagaacgccacgtaggaaacgcctacctgttccgccagagcagcgactgtctccatgtgaaacatctcgtcctccagcgcgtctgggtagataaaattggcgcccacgcagacgctcatcatgccggcaccgtagcgggccagcatgtctttgagcacttggatgtccgaaccgtatttggtcaggttcccttctaacacctcaatataccggaagcctgtatttgtgatttttttcagcaccgcttcgtcgtcgcaaagggtcagataccggatgtccttaatgcttgtaacgccgcctccttctcctaccagagggccgaacgcgtttgtcatataaccgagtttcatgtctgctcctttcttatttttataaatttgcgcaaattaattttacttccattataatactctgcgctgcggcgattgtcaatttctatttgcaattttaagaaaattcgtttgtttcgccaaatataagggacaaaattaggcgtttccaatcaagctttctttttacttgcaatgctttgacacctgtgttaggctgtccgggccggttgctcgttggaaaatgccttgacttctcgttctttcgtgcatatttgcgcaaattttctttaccgcaccaaaaaaacgcggccgaaaagccgcgcgggggataggggcaatgaaaaatcccgggaacccggcttgcacgggcgctatgtaaaaagcggataagccctgcttccagatgcttatccgcttgatattctgtcggtcggtttgaacgcggcgaaccgccgttaaagtgcgccggcgctgtggttgatcgcgttgcgcaacgccgccggcggatcctccttgaagatcgccttccagtttttcagcaggttctcccggtcgatgctgatgggctccaccccgatgaaggaggggaccgcttttcccagcaggccgttggccgccaccattgcgatggcttccccctgctcataggggcactgcgcgctaatcattttgaccatgccgccctgtgccatctgcatggcgatggcatagtccagatctcccgtgacgatcgcgatgtccgtgcgctccagctccgtcagggcctttatcacctccagcgcgggaccgtcccaagaaacatacagagcctgaatctccgggtacattccgatgagcttcagtgttttctggtagacgtccacctctgtcagaaaattgacttttccgcacacccggatttccgggtattcctccgtcaaaacctgttccgccgcgccgtcccgttgctttgtggcaaagaagttctgctcgccgtggcaaatcagccccgcatatttcaggccgtgccgtaccatgtactcgcccaacccgcggcccatactgtccccgtgggctcgctcatttacggagatacaggagatgtaatccttcggggtgagtccctccggaacattggtgatcagcaccaaccgggtgtcgctgtccgcaatcgagcggaaggcttccgcggtgcccctagtatcaacggggatcgagattaggagatccggcttcagaaatttgatgctttccaactgtttgcattgcagtgccgcgttgaaatgagcgtctgtgacagcgataatggaaatcccaagctcgtcgaagacttttttgatgcccttttcctgcaggcgcatccacgccttgcccatatagtggaatgagatcgccgccgtatactgcttttgccgaatcttttccttttccacttcggataaggcaaggccgcccgcacccgctgcccgttccccgaagggaccccggccgattccgcaggtggagttgcgcacattgaggattgatgggagagttttcgtgcagtacgcatgcgcgggcgaagagaggtttgcaatttcgccgcggtcaatccgccggaacagcaggtccgcggcggaaagcgcaaactgccgtggttgcttatccacgcaagtgagctccggcgtcgtcagcgaggcccattccggatcgttcaggctgacgacagagaggtcaccgggtacggcgatgttgtggccgattccataccggatggcgggaatcagaggcagcgagtcggcaatcacgaccgcggtgggcgcaggttctgccgcgacgatctgcgccatagcttcggcggccaacgcctcggttttcaggcccgcgcggaccagcactttttccgacgcaatgccggaatcctccagagccttcctgtagccttcaaacctttgggtgccgcacacttccgactcgcacaggtaagcgattcgctcatgcccgtttttaatcaggtgccgcaccgcgcggtagctaccctcaaaggtgtcgggcagcagggtgtctgcggcaaaccgatccacggggttcccaatcagaaccaccggaaaccggagccctttgaaaaaggctccggaaagcacaccttcccggtccgggaaagcgaccattcccgcaagatccagcgttcctgccagtgcgcggatggccgccagtcggtcttcatcgaggtcatacgccagcgaaatggcgatataacccttctgctctacgatttcttccagcttttccttgacttgattctgaaacaggctgcgttttttcgacagcaagatcagcacatagcagctttcggacagtttgctcttcaatgcactccgtttcgcgatgaaattcgggagctcgtccagctggcgaatagcgtcctcgaccttccggactttctcaggactaacgtatcgggttccgttgaccacgtgagagacggtcgacacggacacgcccgctatcctagcaacatccttgatcgtcgccatgcatttcgtcctcctgctcagaatacttttgctttcattatacagattccgttctcaatagtcaacaaaatttgcgcaaacgccggtttcgggacgccggaacaggaagcagggacaggcaagagttgtgtggctctgcctgtccctggttttgtttttttcatacgcggcatttcgagatacgcctgttctgcaggcaaagccggcagtaaaccagcggtcggttgctcccgcgctgtattttcgctatgctaaagatgctccggaaaagtgcgcaacggtgtcctgctctgtgagtcccctcgcagaacgttaccgtgtgacaacgtccatctgcaggtcagaatgtgcaaaaatacgaatatagatcgttccatcctgcgccacaaaataggcttcatgcaggttcagcccctgttttgccggcacgcggcgcagacggaccccattgagtataacatcctgtacgttcgagacgccttttacaagaagataccgcacgcccgcgcaccccttcgcctgcacggagaagccgttcgagccgacggtaaaggcgtaatcgttttcctccgtatccgacccgttccagctaccggctgtcgcgaacaccggctgcgtcaggacgagcgctctaatccggcttgtggtcatgcttcttccaaactccagggattcgttgagttcaaccgggaacagcgcgccggccgccacgtaaaccgggatctctgtgatgggatacgcacgcgtctgcgccgtatcgccgtctacgacctcggtattgtcgaaaaaattgacatatcggcccgcggggaagattacctgttttctgttgctatcggtgcagattggcgccaccagcagatggtcgccgtacatataggcgtcggtcacctgcgcaacaaaggcgtcctcggggaacatcatcggcagcgggcgaaccataggaatgccgcggtgatgcgcctgaacggctgtgctgtacgcatacggcagaaggttctcgcgcagccaggtgtagaatttatacagttctgtgacctgttcggaatactcccagggctctttcgggaacgtgccgtggtaccgcatcagagggcaaaatgccgcccattgcgtccagcgtatataggtttccgcatcgccgccggaaaagccgtcgtacccgcaggcgtcgacgccccagaacggcaggcccgaggccgagacggaaatcatgccggacagggactgctgcatgcctgggaaggtagtcggttgatctccgccaaactggcaggcataggcctgacacccgggagcaccggctcgctggaacaggacgtggtcgtctccgtaagcgctttcgaagagcttccggtagccgcgcgcgtagtccagcgcgtagccgttgtgcattttcttaccgtttcgcccgtcggaaaagaccgcttcgtctggaatcttgtccccgaagtccaccatagttccgcagatgccggcatcaaaccggtctttccactgtgcctgcagtagctccatggcccggggatgcgtgaagtcgatgtaactgatatattgcatgttccctgtatactgcggcgttttgctgatgggcagatcttccgtatcgccggaattctgcaggaatgctttggcgcgttccgccggcataaccgaatactcccaggagaaggtgtgtatcccgttctgcgcggcaaagttggaaaccctgtgtaattcggcgaggtgtttgccgtccgcgccggcaccttcggcatagaacccgccgtgcgggatatcaagctctttgaatttctgcagcacgccgatctgctcctccatcacgttgtgcagcggcccgttcatccaccgtccgccgcccgcgccgctccagggctcaaacgcccaccgaggcgggagaatcggcaggccggtcaatcgcgcatatgacgccatgttttccaccggcgtatcgccccagaaatacagatccacatggggatcctgtacagtaatggaaaaacggtcctgcacctgcacaccgatatccgcacgcattctgtacgtgctgttgatgtacagcgtatagccagagctgaaatggacaagcggaatattcttatagctctcattggccagtccagcgatcaccgaaaggtaggcgtctcgctggtacatggcaacgatatgcccgcgctggtcgacgccgttgaagcgttcgccgaacccgatgacggactcctcctgaagcaaaggcatctgcaggcggaaaccgtccttcccgcaaacatgcacgcaggaaagcgtctctttgtccatgaagaaaacctgccggtccccgacagacagcacgacgctccagtccgcaccgcgcgtaatcacgacatttcggtttcccgccgccgcacgcagtacggcgccgtcctccgagacggtaaacgtatccggtaccgcagaaaaaagaccgccatccggcttgcttttcaggcggaatcccgcttcggcaaagataagctctagcgtgggcaccgcgtttccaaaatccaaaacaatcttactgttttccgttgtaacctgccgaagctgttcatacggtgtccaatcggcagactggtcgcccaaggttccatcggtgtagtaccactgaatatagcgggcgagccagcgtaggaaccggttcaggcgggcataggcttttccagcctcaccggccgccagcagttcgttgaacacatggcgctcattccacggttccatatgacccacagggcggcttccggcctcatcccagaagaaatccacagcctcctgatagagcacatcctgcaggcgctgggcaagcgccacatgtgccgccacattttcctccgtcgtttccggcagggcagttaactccgtccagagctgctttagctcgcccggttgcacgccggaaatctccgtatagcgcgtccagcgtcttcgggcgctgggcagcaccgcgtagagctcggttccgtataccggaccggcgtcgccgcccagatacgcttccataaacgtggaaggatcgtactcgaaccaataaggtaggttgatatacaggtccagcggcgttgggcacaggatctctccggttgcctgctttttgcggtacacctgaaacgcaaagcagtcgcctttcggaaatccccccaccagcgtccacggaatcttatacgccgcgctccagaagcccgcctggtggtctaccacgaccgtatacgactgcgggtcgattgtctggatgtccgcttggttgccgacgtgacgaaacggcaggttgggttggcttccaccaaacgcctcatcgccgccgatgtacgtcatgccactttccagaaccccatgcgcttctccattgcgtccgaccgaaaataccgcgaagtcccgatggcccaaagtgccggaagacaccacaagctcgtcgatgtctcgacgcacttggtccgcgttctccgcagattcccagttaagaaacaacacgtagagaaaggtgtcatcccatgcagcctgcgctttggtcggcgtaaccaatcctgggttcccgttggctcggtagaactcatcgagcaggagcgcaccgctccaccccgccgggccgggtcgctcgtccggtgtccgtgccgccttggcaccgagataggctgcgtttactccgaatctgtgctgattcatatttctaattacctccatccgttttgtttccgggtgcctttcgcccggtggttgaacccattatagtggcgcaaccgcccggatatctataaaaaaacagcgcgatatttgttgccttttcggttttgcgttttccacagatacggcggcttccctttttgccgcccatccggacttaccggcgatccgccgaatttgtgttggaaaaagttataaaaaaagctttttttgacaattttttatcgcaaatttgacagacttattggaacaaagacggtagaatattgtaaaacgccaaggagacatggcgaaaaaacaaggaggagtaaatcatgaacaaactcaaaagaactgctgctctgctcatggcagccggtctgagtctttccatgcttgccggatgcggcaccccaggtcaggactctacgtcggcatcccctggtgcggaacagaacacaaccgtaggcgcagcggaaggctacacgtacaagatcgcaactgtacgctggaacgacacctggcccacggactttttgaccgacggtgtcatgggggatctggctaaggaagccgacattgacatcgagtggcaaatctactactccaatgatttcggtgagcagaaggcactgctgtttgccagtgacgacctgcccgacgctttcttcggctcctgcggcctcggcgattccgacatcgtgcagaacaaggaaaagcttctggagctcaccgatctgatcaacgaggagaccatgcccaacctgatgaaaatctttgaagaagatcccactatgcgcatggcctgcaccgaccgaaacgagcagatctacagcctgccgaagaagatccccttccggccgaagctgaacagccagaactacatcaacaaggaatggctggacaatctgaatctggagatgcccacgaattacgacgagctgaaggaagtactgatcgccttcaaggagcaggacgcggacggcgacggcgacccgaacaatgagatcccgatcagcggttacaagcccggatacggtagcgtgcttctggattcattcgacctgatcgagcgcggtgacgagcacatgtcgctggacgccaacaacaaggtcgtctttgttcccacgcaagatcattacaaagaagcagtcaagtatttacgcgagctctgggagctcggcgtgatggacgaggaatacttcacccaagaaggatctatgtacactgccaagttgcaaaaggaaggcggctctcagatcggcatcttctccggttggacggcagactcctgggctggccccaataccaagcagtttgtgcagatgcccacgctggaaagcccatggggcacgaagaacgctcagagcatcgcgagcacagagtacagcgataaggagctgatcctcaacattaactgcccgaatcccgaaaaggtgctgaggtgggccgacctgttctacgacgatctggtttcgctccagaccttctacggctccatatccaccggtcagatcaaggataacggcgatggcacctatgagcttctgacgccgaaggacaacacgttggatacttccgcctggtggtactctccccgcgatttcggtcccaagtacatgcgcaaggaatttgaagaaaaggtcacgctgcccaccgatcagggcgacgggctcaagctggtcgaagacgagctcaacgcgcagtacgccgacaacccgaatctgctgcacgcttggccgggtacgattaagttcaccgatgacgaaatcaacgagagaaccgccttgaacgtagacattaatagttacgtggaagcccagtgggcacactggattaccgaaggcggcgttgaagaagaatgggacgattatctgcagcagctggacgccatgggcctgcagagactgattgagattgatcagggcgcctatgacgcctatgtggaaatgatgggctgatcgaaaccgaaggaagaggtgatcacggcggcgccgggttatctcttcttcggaaatttaccgggcctttcacggtaaaatggtgaaaagcgcctgcagaaccgataccccgacccgttaggaggcagagaaagctatggcatattccatcctgattgtagatgatgaccggacctttgtagaggagctcaagtcggccctgcagtggaaccggctgcggatcaccgaagtatacacggcgttttccgttagggaagccatcgcgtttctctcgaagacgaaggcagacatcgttctttgcgacatcgaaatgccgggtggcaacggtcttcagctgctcaagtggattcgggaaaaccacgcgtcgatggaatgcattgtcctttcgagctacgcagaattttcctatgcccagagtgcgttgcggttcgatgtctgtgactacctgctaaagcccatcaaggccaaggagctggaagagacgatttcccgggttgttgggcttctggatgcacggcgcggctggcaggaggaaccgctggaaaccctgtgggccgccctgtttgacggcgccgtcaaacaggcggatttcactcgtcaagcgcaaaagcatggcttgaccgaaaattccagtctcgcgattctcctactgcgctttgtccccgtgcccggtcagcccgtcccttcgcactatggcaggccgctggtccggcaggccattttggatctggccgaccagaacgccctgcaaaccgtcgttcgcctgagcgagacccgatggatcctggtctgccgtgccacagggaaagatccctttcctcgcgcgccgctggcggcgtttctcgacgccgtagaggcgcggatcggccttcaggtctgcgcatactgcggagaaaaaggcaccgtcgggcaggcagtgtccatgtgggaggcgctctgccagctggaaaagcacaccgttccggatatgcagagaatcgcgcagggagtcgacctgcccgcagacaagacacagcggcgctctttccccttaaagacatggaaaaaaatgttggttggcttcggtcccctcacaagtctagaagcgtccattcgggaagaaatggtgcgggtccaagcggaagaaggatggacggtgaaccgactgacggtttttttgcggacctgcacgctgatgctgtccaattacctgcaaagccgggatatgtctctggaggatatcatcgactcagaggagtacgaccagatggaaacctttgctgtttccagcctgtgtgcgactgcctggtttatgcacaagatcctcggcattgtcgaaggcagccgggatcacaagtcggacgccatcactaccgtatgccaatatattcttgacaatctggaagaagatctgtccagaaaaatgctggcgaagctcgtgttcatgtcagaagactatctttcaaagcagttcatgcgcgccgtcgggatgacgctgccggcatacatcgcccagaaacggatggaaaaagccaaggagcttctggagtacccggacatcaaaattggaaaagtcgccatgcgcgtcggttactctaacttctcctacttctccaaaacgtttcacgattataccgggtttaccccgaacgagtggagaatgtaccatctgcacgggacggaggacaaccggaaagaacccggaaagaacccggaaaggatcgcgaaccgctcttgcgggctgcgcccggtttatgcactgccacactgaaagccgtgatagaactatcccggtgaatttaaacataaaggagagagaaaactatgcacgcgaatggattcgctatatccgcaaaagagaaaaaaagccgcaggcttttgctgctgaagcggagcgtgccgctttacctgctgattttgccctcgttgatcttattgattgtgttcacgtacattcccatgtacggcgtaactatcgcctttaaggattacaagaccggtttgggcatcttcggcagcgaatgggtcggctttaaaaacttcaccacctttttcaactcttaccagttctggcctatcctgcggaacacgctggtcatcagcatttactccattgtggtgatgtttccgctgcctatcctcgtcgccctgatctgttcgcagattacgtcgtcgcgctacaagaaattctttcaggtgacgacttatctgccgcacttcatctccactgttgttatgtgtggcatgatcatgctgtttctttctccgtccagcggtatcatcgcaaagctactgagctttgtcggcatcgatatgccgaacctgatgggttccgcctccgcgttcccgcacatctacgtctggaccgaagcatggcagcatatcgggtgggacagcatcctgtatatcgccgcgctgtcgtccatagaccccacgctctatgaagcggcaaccatcgacggcgcaaacaaatggcataagattttccacatcgatattccgtctcttcttcccaccatcatgatcatgttgattttgcgcatgggcagcgtgatgagcgtcggttttgagaaggtctacctgctgcagaactcgttgaacaacgcaaccagcgaaatcattgctacgtatgtctacaagatgggcctgctgaaatctcagtacagcctgtccgccgccatcggcctgtttaacaatgtgatcaaccttattcttcttctggtgttcaacttcatatcggcgaagatatcggaagactccttgttctaaaaagtggaaaggcggtagaactatcatgcaagcaaccatcagaaaatccaataaagtgcgccgtagcaaaggagacgttatcttcgacaccgtggtgtacatcatcaccgggttaatgatcctgattgccatttaccccatgtacttcatcttgatcgcatcgatcagcgaccctgctctggtatcctccggcgagattgtcctaattccgaatggatttaacctgcgggcctatgaaaagctggcagagtttgacgacatctggaccggatatcgcaacacaattctctacgtgattggcggcacagcaatcaccctagccgtcaacattcccgcatcgtttgctctgtccagaaagcaactcttcggcaagcgcgtgctgatggccatgtatctcatcccaatgtttttcaccggcggcctgattccgacctatatggttgtgaaggcagtcaatctggtggacaaccctctcgtgatgatcctgccgttctcggtcgccagctactacattatcgtgggccgtaccttttttcagaacaccattccggaagaactgtgggaggccgcacagttggacggctgcgggcaggtcagatacttcttcatcgtggcgcttccgctttccaaagccgttctggccgtgatcgccctgtggtcggccgttggacaatggaacgggtatttcaacgcgttaatctatctacgcagccccgaattccaacccatccagattgcgctacgcaacatcctgattaacaaccagatgatgggtatgacgcaaatcggcgcggctgccgtagaggcgcgacaactggcagagctgattaagtacgcctccattgtggtctcttctctccccatcatgttgctgtatccgttcgtacagaagtatttcaataacggcattatgctgggctctgtgaagggataataaggaaaaatgctgaaccggactgccgtattgttctgcagcagtccggtttcggtattttcttcttgagactttaccgattttgggaggtggtcaagatatataagaaaaagaagctgcgcgtactgctgcgctttttctctgttctgttcctggggctatttctgattttctccgtcatccacctgtatctgggccagacgctgcgtgctgtggaggatcaatatatagaggaaaccgccatcctgtacgtaaagaatatcaaccggaaaatccagtccatcaatcaggagtttctcatgctggccaataatctgcggaatatccttcccggcatccctcaaaatatcagtccccgggacggtggatactacgacgttctgtttatggccagcgacctcgttggcagcctgaagacacgctatccggagcttaagcagtcctttctctactggccggcatccgacctgcttgcattctctacgggcctctcttttgcatcgacggacgatttcggcattaccggtcaggtgaagcagcggctgcgtcagcagaaggacagcctgtccacccaggtatgctgggaaatactgacaagtggagaggaaacctacatattggggtggtacagacagaaggagatcatgctcgcctgcctgatcgacctgaatcagctttttgcggaaatcaacgatatgccgaaaagctactcggtcatttcctttctgcggtggaacgacggccgcgtgattgcgccgcaggcttaccgaaaacaggccgagcaagccatcgccgacggcgccgaggtatacacatacccgcttgcaggcctcggcaccgcgtacattcaaaaggttgaggacggagagctccttcaaaacgtccacttccaactcggtctgttcaacatggaaatggtcctgctttggttggaggtcattctggtcgtgcggctctgctacaggtggctgttccaccctttcacgaaatttgtgaccggtctggagaacgttgggacggaggagatattcgatcggctggacgaaaatgacattttggagctggaaaccatcaaccggcagttcaaaacgctttcacaccgcctgaaggacatgcgcatcgccttgtacgagcaggagatcaccaagaagcagaccgagctggagctgctgcaggaacaggtccgtcctcacttcttcctcaactgcctgagcctggtgcacagtctggccgaccgggacagcaactgggaaattacggaactgctcgaagacctttccggctatatccgatacctgttcggcccgacggccaacctacgaaaaatctccgaggagatcaaccacgtaaagctgtacatacagctgcagcacaagcggtacggcgacgccttttcctgtactatagacgtcgacgaggatcttctggattacttcatccccaagctgatgctgcagacactggtcgaaaactccatacagcacaacgccatctatgagcgacctgtggaggtttccctgttcctgacaaaagaagtcatggacaacgagacctggctttactgctgtgtctccgatacgggaaaaggattcagcgatgcggtcatggacgccattctgcacgaccgggaaatctaccgggacggtcggcggcatattgggctgtccaacctgaaagagcgcctgaagctgatttacggcaacgacgcgactttccagctttccaacatggctgacaactacggcgctattgtggaagtgcgcatcaagctgtcccgcataaaatcgccgaacgaaccgtaaaccgacataaaaatcacaattttctaaccggaaaattatagattgtctgttgtgaattcagtattctaaattaagaaagaaaagccgcggcacgcacggcagcgggtcaaatacccgctttcttttggaagggaggcagacagaccgtttttaagcaggcagcggacatcgtcccagagtgaccgctgcgcagaagatcaactgacatcgacattggagaggagtaaaataaaatggcaattcatgtaacagtatggaacgagtacctgcacgaaaagcagtttccggaaattgcgtctatctatccgaagggcatccacgggtgcatcgccgactttttgcagaaagcgggcatgacggtgcagacagcgacgctggaggagccggagcacggcctgacgcaggacgtgctggacaacaccgacgtgctgatctggtggggacacatggcgcaccacaaggtagcggatgagatcgtcgagcgcgtgtaccgccgcgtgctggacggtatgggactgatcgtgctgcactcgggccatgcgtcgaaaatcttccagaaggtctgcggcacgaactcgggcaggctgaagtggcgcgaggacggcgagcaggaaattctctgggtcatcgacccgagccacccgatcgtcgcggggctggacgagaagattatgatcccgcacgaggagatgtacggcgagcacttcgatatcccgcaaccggacgagcaggtattcatcagctggttcgagggcggcgaggtgttccgcagcggctgctgctggcaccgcggcaagggtaaggtgttctacttccgcccgggtcatgaggcgttcccaatctattatcagccggagatccagcagatcatcgtgaatgcggtcaaatgggccacgccgattgattttccgcctgtcacctacggcaatccgcctgccattatggaagtacacggcaaacttgagcacagcatacaggggctgcatcaaccgaaataaggacgcgttaaaaggagaaattatatatggaaaatcaagtcattcgaattggttccgtcggcgtaggcggcatctggtccggcgtgcatgagcccggcatacacaagagcccgaatctggagcttgtggccatctgcgatattgaccgggaaaagctggatgcggtcggtgagaaatacggcatccccgcggagcgccggtttacggattaccacgacctgatccgttgtccggatgtggacgcagtggacatctgcacgtcgaacgacgcgcattttgagattgccatggcagcaatcgaggccggcaagccgtacgatctggaaaagccgatcactatgacggcggcgcaggcggagcagcttgcacaggccacgcgcgtcaaggcattgcccaacatggtttgcttttcgtaccggttcaaggcggcggctcgctatgcgcgggagctgatcgcaagcggaaaaatcggacgggtgtaccacgttgacatgcagtattttcaagcctggggcttgccgcgcttcaacacgccgcgtgtatggcggtttgtaaagtcgcgtacgggctcgggcgcgctgggcgatttgggttgtcatgcgttggatctcgtccgcttcgtcaccgggaaggagtacacgcgtcttgtgggccatgtaggcacgtacgtccgcgagcgccagaatttggacggcaccgggatgggcccggtagacgtcgacgatttctgcaattacatggctgatatggaggatgccatctccgtcagtttccagattacacgcttcggctacgggcgtggtaactaccaacgcatggaaatctacggtagtgagggcgccatcgtatattcgttggacgcgcagccgggcgaagaagatgttatcgaggtttgcactggcgacgtttacgctgaggggcgcgtgttctccagattgccaattccggaccggtgccgcagcgaccagatgcagagctttgccgacatccttttgaagaaaggggacggcttggccgccaccgtcgaagacggtctgaaaaaccagcaggccgtagatgccgttttggcctccgcagaacagggcaaatggcttgtcctgtaagaactgcggcctttcccacagataacgcctccgcgccaggccgtatctgtcaggatcttgccgaaggaggagaagaacacttgcaccaccatgacgatcgagaggatcaggccgtactgaacatccgtgtgaccctgcgtgtacatacacagcgtggtgaacggcgtgatcagcgccagcgtgcaggccgcgcaaaaagctaaaagtctttggcatatccaaacgctgaacgagttcagcaggaagatgaagaaataatgtgcgattctgaaattcgcacactcgcacctgcctttcggttttggtagactgtaaccgaaaggcgggtgcattttgcattgcagacctgccagggaaattttgaatgggaggatcacatatgaaatcgctatttgagcagctgggcggcacttacacaaggcagggagactattgcctacccaatgtttgcttaccgcccgaaggagaacggcctatcggcatttacggccagcggcggcgagtttatctgaagaagcatcatcgggtattgtatttcaacctgctgaccgccggggtgctggatgggcacctcgcagacatcgaggagcaggcgcaggaactctttcttcggttggtagaacaatacgcagatgccgagggtgtgacggaggccttgaaagccgatgacccgatggcgtgggtgcgaaagatgaacggcatccgacatcgggcaaatgaggtcgtaatgcaggaaattgtatacggatgatgagcaagcggaggtcgatgacctccgcttgttttgtgtgcagaaaagaacaatgctgtttttaaacggcattgttccgaactttgttgacattattcttttattcgggtataatgtacttgtgattttatgcgtggaggtatcccctatggctgaaatgatctcggtaagagaagcagcaatgcgctggaatataacggagcggagagttgcgacgctctgcaagaatgggagaattgccggtgcggaaaagcagggcaatcgttggctgatccccgctgatacgcagaagccggcggatcagcggctcaagacgggcgctttccgcaagacggagcgcgcgccgaagctgcccctgcccatcggcgtgtccaactactgccttgcctcatcggaatactactacatcgacaagacgatgatgatcaaggactttatcgatgagcgtccgatggtgacgctgttcactcgtccccgccgcttcggcaagacgctgaatatggatatgctgcgcacttattttgaaaagagcgacaaggatacctccgtctacttccgggataagaagatctgggcctgcggccagaagtaccgggattatcagggcaagtactctgtgatcttcctgaccttcaaggatgtgaagttcgacacttgggaggagacctttgcagccatccgggacattttcgcaaaggagacccggcggcacaaagagctgctgaccagtgaaaagtgcgacgagtacagcaaaaagacctatgaaaagctggcagacggcaaggtcagcgaggtagagctggcttcggcactgctggacctgtccgctatgctgcacaagcactatgccattgcgcccattatcatcatcgacgagtacgacacccctatccagcagggctatcagaaggactattacgacaaggtcatccggtttatgcggaacctgttttccggcgggttcaaggataatcagcacctgtccttcggcttcctcaccggcattctgcgggtggcaaaggagagcatcttcagcgggatgaacaacctgtccatcaactccgtgctggacaacaaatacagcgcctacttcggcttcaccgccgatgaggtgatggagatggcggaatactacggtgctgccgataagtacgacgagatttgccaatggtacgacggctaccgcttcggcaagacggagattttcaacccgtggtcggtggtcaactacttcagtaacgagtgtgagccgaggcccttctgggtctccaccggcagcaatgatattatcggggaagtgcttgcccaggcggacgaggagatttataaccgtctgacctccctggtcaacggcgagactttcaccaccttcatcgacaccggcgtgatctatccgcagatcaaaagcaatccctccaccatttacagcttcctgctggtgaccggctatctgaaggcactgaaaaccacgccctccttcagcggcgattttatgtgcgaggtctccctgcccaaccgggagatttctctggtgtataacaaggagattttgcagcggctggaaaatctgatcccgccgtccacggcaatttccgttcaggaggccatcttctccggcgataacgcacggctgaaagcgcagatccagacgctgctgacccagtcggtcagctccttcgatactgccggggagaacttctaccacggctttatgctgggcttgtgcgccctgctgggaggtgctttcgtgacctccaaccgggaatcgggcgacgggcgctatgacattcagttgaagcccacgcaaaagggtcttccgggcatcctgatcgagctgaaagcggagaaaaattgcagcgacgaaaagctgaaaaagctgtccgagacggccttgcagcagatcaacgacaagaaatacgagaccgagctgacgacagccggggtcaggacgatttataaatacggcgtggccttcagcggtaaaaaggtcgaagtggcagttggatgaggagtgagaattccaaagtatcagctttcagcttccaaagtatcaaattgatactttggtgaaatcccaaagtgccaacacggtggttccaaagtgccaaattggcactttggggcagaaattatgaattaaaccatattggaggatgcacgatgagcaccaatatttcgaaaaagaagcgggacgatctgctggacaaaatcaagcagattcgtgcctttatcgccgcagcaccgcaggatgagaatacgggcaacctgctctcctacctgtccgaactcgaaaaagatgtgaacgggaaaaagtacggtctcgtgttcgaggagcatcgggaggaaatcgatgaggtgttggatacccatacgccggtgctgaccgaggatgcagatctgtttattgaccacggcgggcagatgaatttcctgcttgaaggggataaccttgccgcactgaaactgttggaaaagacgcatcggggaaatatagatttaatttttattgatcctccgtataacacaagaaacggagatttcggatatgatgattctcgtgttgatttgacagatacattccgtcacagcaaatgggtctcattcatgagcgagcggttattggtagcacggagattgctaaaaaacgatggcgtaatatttattgccatagatgataatgagcaagctgcattaaagctactgtgcgatcaattgtttggggaagaaaacttccttgcgagtattatatggcaacatagcattcagcctaaaggatattcagggacgttttcggtgcatcataactatattttgtgctatcagaagacagctcagtttgttttgaactctttgcctcgcacagatgaagacaataaggcctatgcaaatccagataacgatcctcggggaagatggaggagtggtgatgtacgcaatgcattatatcgacctaacctaatttacgacattatttctccgtccggaaatgtgattaaaccctgtgctaatggatggcgttggagtaaagaaacggtagaagaaaagattaaaagcggtgaaattatttttagcaaagatgagacccgtattattaggaagatatatttggatacattagaaggacgaacgccagaaacaatttggtttggaaaagatgttggaacaacccgaagcgcaatgagtgaaatcaaagaaatctttggttcgagcgcatttggaacccctaagcctacaagtttaattgaacgcacactacgattgatatcacgaacagatgctaccgtacttgacttctttgcaggctctggtacaacaggtcacgctgttatgaagctcaacgcagaggatggtggaacccgccgctttatcctctgcaccaacaacgaaaacggcatttgtcgggatgtgacctacgaacgcatccgccgtgtcattgataaagaagactatgctgccagtctgaaatattataaagttggctatgtacctatttcggatcgtatgtactatgagtatgccgatgagctgctgcggcacatccgggagctggtggagctggaaaacggcatcaattttacgggcaacgaggaaattgccatcgtgctgacggatgaggagttagagatatttttggatgatgaaggtatctgtaagagatgccgaaagctctatatggggcacgatgtattgctggacgctcagcaagcgcaagcgctgcaggaatataacattgcagtgaatgttattccggattattactacaaagaattggagggataaatatggggatcacgcttgcaaattttcaacttaaagccattgaggcccttatggaagctatgggagagcccaatagggatattatcctgaagagttgtactggtagcggcaaaaccattatccttacacactttatggatgagtatctgaagagcacaaacaaagcagtgtttgtttggcttacccccggaaaaggtaatcttgaattacagagtaaagccaaaatggataaatacattcacggcagcaacacaaaactcttatccgatataatgtcttctggctttgaagaaaatgatgcctgtttcatcaactgggaaaagcttactaagaaagggaacaatgcacttaaggatagtgagcgaacaaactttgtcgaacatattcagaatgcaattgacaacggtttgacttttaccataattgttgacgagtcacatcagaatgatacgatcaaagcagatgacattcttgctctgttcaatgcgaataagattatccgttgttccgctacacctaaaaactacaagaatgctctgctgatagagattccagaagaagatgttattgctgaaggcctgataaaaaagctcctgataatcaatgaaaattttgaacagcatattagcgttgaagatcagatatcctacctgctggataaagccctcgagaaacaacgagacttacgagccgcatacgccaagaaagattctggcgtaaatccattgattatcgtccaattaccgaataaatcagatgcactgcttgaccgtgtcgaagagtacttcgaaagcaaaggcattacttacgagaataaccttctatcggtatggttgtctgataagaaacagaaccttgaggatattgaagataatgacgctactccaatagctgtaattatcaaacaggcggttgctaccggttgggattgcccaagagcgcagattctcgtgaagctccgtgacaatatgagcgaggtatttgaaattcagacgattggaaggattcgccggatgccggaagcaaagcattatggtgaagatcttttagattgctgttatctttatactctggatgagaaatttacggaaagcgttaaattgagtttgggcacgggagcattagatgcttataaagtgttcttgaagccggaatatcgttcctttacgcttatcagccaatttaaaactgatattccatttccacgcgatgctaagtttgcactcaaagttatttggaagttctttgagaaaaaataccataccgctacggacctcgataaaaaccaaagtcagttagaagcttatggctattctttcgacgaagatattgtggattttaccaaatctggttccgtcagcgtactgagcaaagaccaaatcacagaattaaatgacatctcgattcacgagccattgaatacgcataaacacggcaaagagtatcatcactgtgtcgctgagattggatacaaagccaatttggactatagcagcactaataccattatgcgtaagctgttcctaaaaggagttcggtgcgacgcaaaaattcttcgtctggaaacacgaaacctatatgcatttattatcaacaacgagcgaaggcttatagaagatgtccgtgatgctatggctgatgagtctttgcagctaacgcttgcaattccccggataacagaaaaaccagtggggtttcctcttgaaatgattttcacatatgacggaacatcaaagtcacagatggaatacaccaagaatgtctatacagggtatttatcttctgcggaaaagagatctatgccggagaagctgtttgagcgtttttgcgaaggtagtggcaaagtgaagtggttctataagaacggagataagggctcagagtatttctcgattgtttatacggataactttggaaaacaaaaatccttttaccccgattatgtggttggcacaaatggtggcgatatctggattatagaaacaaaaggtggttttacaaagtcaggaagcagtgaagatattgatcgcttcactgcaaagaaattcggcgttttgagaaaataccttgatggatacaacctacagggtggcattgtcagacaggataaacaaagtggagaactatgcatttgcgtagacaagtactcagacaatatccacgatgaaaactggcaactgctttcggaagtgctttaaggaggcggaatatgagagagcaagaactgtggaaaaaagtgcctatctatttctactacctttctatctctaagcataaagatgcaaaagatgattcggcttacagtacggatcagattatcatcgctttttcccaattgctggaatatataatgacaaaaggactttctgaacgcaagaaagacattacatcgtcagaaaaggtcgtgtggttagattcttacgaggatttgaaaaacggaaattatgatgtgattttcaagtcggcaaaatacaaccacgttcggaatgaaatcgacactgaaactatgcaggagcgaggacgacgaaagagacctcaggatggagacgaagaaaagacacatctatgcattcgccttgcaaaaggcgaaaacaggtttcttgcagttcacgaaagcaatcactatggcataactctaaagtgtattatcgactacttgaatgaacaattcaagaagttcaatgaagacggaaatgacccgtaccactacaccattgaaagtcagattatgccgggagaagatttcctgtcttcaatcaaaagagccaaaacaatgtcagtcctcaagttgacagtatacaaagacgatattaaggatggctttatgcggtttgcgggaagaactgacatcgctgacgaagtcgatatttgcttgaagcgtcctaaaggatataaatgctttcctgaaaacttaattaaggaatattttaaggattcgcaagacaaagctaagggcaagattaagcgtattaagattatagggacaaatgacgccggaagttttgaagtggatactaatatcacgggaatgaagcatttcttaaaggtgaagggtgaaagcgtcacaaacgaagtggagagctcagatttttttgtgaaggctcaggagttcattgcctcaatgggtggtagaatatgaagacaatattacttgttccacttagggactattatcaatccagaaaacgaatatgggtaaaatatttgattccggtagttttggggcttttggcattggcaggtgcactcatatttaacatcggcaacgaggaaaccatccggtcaactttttccgaatttgtgaatgtccaaattaatgtcgttgccatccttgtttcattttctgttgcaattatttctatactggttacagcagacaatgcaaacaccaaaagtctaaaggaggaaatggctgactctactcaatataagcctgttggcggaaaacagctgtctctattccaaattttgctttccaacattgcatacaatgtcattgttgaaattatttacttagttattctcataggaattgctctcatacggccaattattcctttacaggcattgaaatatgttgctgcagtatgcatctttgccattatgcatattcttggggtgttgcttgaatcggttgctcagatgtatctaactttttggagaaacagatagccacggcttcacgcaacgcacatcattatcagcaataagatagaatggacattgcgaacagaaatagcgaatcagtataactgctgaaaaccgaatagtatatttagaggcgtagccttcggagaaatccggaggctgcgcctctttttgcgttcagataaaaaatatttgagaaatttctcgaaaacacccccacaaacggcgccccttattcagagtaagtgaagggagaaatatttttgtggggaattttgaaaagtaccctgccaaatggcaccccttattcagagtaagtagagggaccttttgaaaagttgagagaatttttcaaattactttgccaaaatctcaaaaaatttcccagttggttagtaggaggggcacttaaaaaaatttttctaaaacccatttgttatttgcccgaaaagttcccagttgattagtgggaggggcgcttaaaaattttcttcaaaattctttttatttttgccggaaaaattcccaattaagtagtagaggggttcgcagaaaaattctcaaaagttttttcgttcaaatccgaaaaaatttcccagttggttagtagataggctttcaaaggaaattttcaaaattccttcgtacaaatcgaaaaatttttcccagttgattagtgagggggttaaaaaacaggccttctcgctggctacctattgaggggactgtctccctgtgtaccttgaaaattgaatcgccgcctccaaaggatatgcttccggcaagtgacgccacgacttcccgaaaaaggaacgagcgcattaaagaagcgatacgccgtggtgagactccggggcaggaacgatgcggatgagcggcagcaagtaaaaatcaccgcagaaatgcggtttcagaacagacaaaggaggttcaagcctatgaagaaaggagagctcagagagctttatcagatgatgtttccggaatacccggacatcgtgaccgtcaaagagcttcgggagatgctgggcatcagccgcaagctggcctacaagctgatcgactatgggtacatccacgccgtgaagatcggcacgacgctgaagatcccgaaaatcagcgtcatcaactatgtaatggagaaagaggtgaagaaggttggatgagatcaaacgcctgacacccgcccaaagggcacgctgcaaccggctgatccggcggctgtgcgccaactacgacggtggcaactgcctgcctctggacgacggcgagggctgcgtgtgcgtgcagatgatttcctattcgctgctgtgcaagtacttccggtgggcagttctgcccgccgacaaggtactctgcgccgatatttaccggcagcgtacacggacctgcgaacggtgtggaaagccctttgcacccagtagcaaccggcagaaatactgcccgggatgcggctactccatccgacgcaatcagaaggcggactctgccaggcggcggcgcagcgtcgaacattaagcgccgagaaggccttgaattccaaggcttttgggacagcagagcgggggtgggtggccgtttccattcgcccccgccaaaatctacttttaacattctacaaaggagaattctatggacaacaaactgaaaactgtggacgcagagaccctgctgtccacgccgatgagcaaaacgatgttcatcgtggacggactcatttcgcagggcgtcaatgtcatcagcgatgccagcaagatcggcaaaagctggctgatgctgtggctggggctgcaggtggcgcagggaaattccatttggggcctgcccacgctgcaatgcgatgtgctctatctgagccttgaggacacgcagcgccgtatcaaagaccggctctacaacctcaccgacagcgccccggacaacctgtattttgccgtgacctccgggctgatcggcggcgggctggaggagcagatcacggatttcctgaccgagcaccccgccaccaagctggtcatcatcgacacgctgcaaaaggtgcgggactccaagggcagcgccggaaaggcggggatgtacggcaatgactacgatgacatttcctccatcaagcgtattgccgatggcttcaacatcgccattttgctggtgcatcacctgcgaaagctgcaagacagcgacgatccctttaacgatgtcagcggctctaccggcatcatcggcgctgcggacaccaacttcatcctgcgccgtaagcgcagcggaaacgccgctacgctgctggtcagtgggcgggatgtggaatatcaggagctgaccttgcagtttaacgaccttgtctgggagctggtggagtgcaagaacagcgaggacattcacaaggcggaactgccgaaatttctgtttcgggtggtggactttatggagcaccgcaccgaatgggtaggcacggccacggagctgctgaccgaaatgaaggagcaggaggtcacgcccaatatggccacgaagtatctcggccagtttgcctatgaggtgctggagccgctgggcatcgagtatcgcaccaagcgaacgggaaaaagccgactcatcaaatttctgcgccgtgacggtgatgacgcaaatgacgccgggatcgctatataaggaaatccccgtcacaaccgtcattgccgtcacaaaccgaagaaagggggtgaacaaatgcgcagcaaaaactacgggatcaatgtccgtgtgaccgagcaggagaagcagaagctgctggaaaatgcccggttctgttctctgccgctgtcggaatacttgcggcggctggggcttggaaaagaggtcaaagcggccatcacggagcgggattaccgcctgtttcggatgctgaacggcctgaaagcggaactcccacagcttcagaaagaggaaattataagcagactggaagcagttttgaatgaattaaagtaagcgagaattacgcctgcgcagtctaagcgagcagactgtttttactcctgtcggagccaaacagtgcccctgccgccgatgcctgcgtcatctgagcgagcagtgcgtttttactcccggcagggccggagcgcaaaaacactcgttagggcgtgccctaaaacccctgaaagaaaaaactatgaaagtgaggacaacacaatgagaaaattggattttactttacccacgctggacgacctgttctccacgcaggcggagcgggacgatgccaagctggagcgggtgcggaacattccgctggccgagctgcacccgttcaagggtcaccccttcaaggtgcagaacaacgaggagatgcagcaaatgatcgagagcatccgcaaggtgggagccatcaccccggcgctggcaaggccgctgccggacggcggttacgagctgatctccggccaccggcgactggcggcgtgtcaggtgttgggcgtcgagacgatgcccgtcatcgtccgggagctgtctgacgatgaagcggtgatcgcaatggtggacgccaatttgcagcgggagaccatcctgcccagcgaaaaggcgttcgcctacaagatgaagctggatgccatcaagcatcaaggtgtcacttctgcccaagttgggcagaagctgctcagtgtagaaaaagtagctgacgatgccggcgaaagccgtaatcaaattaaaagatatattcgcctgacctacctgattcccgaactgctttcgatggtggacgacggcaagattgccttcaacccggcggtggagctttcctacttagactcgtatcagcagcgggcggtgctggacgcgatggcgctgaacgactgcaccccgtcccacgcccagagcatccgcctgaaaaagctggcgcaggagggcttgctggatgaccagatagtctacgccgtgctggcggagacgaagcccaaccagcaggagcagctgaaattcaaacgggaggagctgcggaaatacttcccctccggctacaccgaggagcagatgcgccgggacatcatcaaggggctggaattactgaagcggcagagagaacggaaccgggatgcccgctgattcgtattgatgcggctgtaatcaaacaaatcgcagaatagagagaaccccaaaccgatggtatactgatgctgtcggtttggagttctgttctgcaaatacaaaggacaggaggagatgaaattggtagcaggacatctgacattgaaaaacggcaggtattacgccgtgctgaactatagaaacgccggagggcagcggaaaacgaaatggatcgcactggggcttcccgaaaagggcaacaagcgcaaagccgaagccgagcttgcaaagctccgggcggagtttgagccgcccaaagaggtgggcgacctgagcagcgatatgctgtttgccgattatctgctggaatggctggaaattgccaaagggcggctggctgtggcaacatacagttcttacgccgcaatgatcaagatgccagtcggaccgtacttccgccagaggaatctgaccttgcgggagctggaagccagacacttgcagatgttttattccgaaatgctcagaaaggtaaaaccgaatacggtcatccactatcacgcgattatccactcggcgctgaaatatgcggtcaagaccgatatgctgatccagaatgtggcggacaaagtggaccggcccagaaaaaacagctttcagccggttttcctttcggcagaggaaatgcagaagatgtttgaagctctccggggcaccaagctggagctgccggtgctggtggccgctttttatggattccgtcggggtgaagtgttgggattgaagtgggacgccatcgactttgagcgtggaacgatttcagtcatacgaaccgttacgaccattactcttgatggcaagcaggcggaaattgaacagcagtccgccaagaccaagtccagtctgcgcaccctgccgctcatcggcagcttccgggaatactttatgcaggtgaaagaggcgcaggaactgaacaagcaggtctgcggcaactgctacaactatgaatacgatggctttgtattcgtggatgagttgggcgagcggatgcgggtggaatacctgaccaacgcatttccgaaatttctggagagtcacggtttgcgccggatgcgctttcacgatctgcgtcacccgtatgtcaagcacacgacaaaaatttttagcttgcgcttgatggattttcaagcgcaggcttatcctgatgctcggcgaaaaactcgcggagcttgtcagcttcatcggggaggacaaagccaaagccctgtccgtccactctgcaatagaaagcgattttcatgactgccacctcaatcaaaaatgtcctggattttgtatgcgatctcgatgcgcttatcgggatataccagcacccggtcgatcagcagctcggccagctcggtggtcagcgtgtccgcatcgaaaatcaccttggacgcttccttgcggctgtcctgccgtgcctgttcgtcctgcttctgtttcgcctgtgccaatactgcggcataggcatttttcgttttcaaaagcagctcgtcacacgcggccttttccgccttgtaggtgttcaggtcgatctcgcccatgagatagcgttcgtaaagtgtgcgcttgccgtcttgcagcgtttcaatctgctgctcatattcggcgcgttccggtacggaagcatctacccggagcgtaccgtcaggggcaagcggtgcggcggcctccaactgctttttcagcgtcaggaataccgcctgttccagctctgcggcgttcaggtgcatcttgtggcagcggctttcaacgtccgcctcagaatggcggcagtaatagtacgaggttttctgcatggtgcgggatagcgcatgaccgcagcagccgcagaaggctttgcctttcagcgggtagtcccgcttctttttgttgggctgggaaaagcggagctggctggcctgcacggtatcaaacacagctttctcgacgatggccgggtgatggtcggggatgatgtaccacgattctctgtccttcaggcggcttctggtgccgcctacttcgagaaccgcccgcttgccgatcatatacacgccggtgtagcgttcgtcctccaaaatgcggagaatggtggatgcactccaaatcccgtggcagcgggaaatatcgtgggtatgattgccgtgcgccgctttgtactggccgggggtagggatgcttctgcggaacagctcccgtgtgatggcggtggcgttgatgccctcggcggcaagctggaagatgagctgcacaacggcagcagcctccgggtcaggctccattctgccatcggcgcttttgcggtagccgtagggacagattttgctctgatactcgccgcgctgcatcttggcgtacttggcgctcttggttttaatggacatatcgcggctgtaatattcgctgatgagatacttgaacgccacgtccatgccgccggtgtcacccttgaatttgctgctgtcaaaatcgtcgctgatggaaatgaagcgggtatggaacagtgggaacacacgctcgatgaaatagccggtttcaatgctgtttcgtccgaagcgggaaaaatccttgacgatgatgcagtcgatctgattggcccgtaccagctcaatgagcttctgtacctgcggacgctcaaaattcgtgccgctatatccgttgtcgatgaactccgtgatctccgcgttcagggcttcgggcatggaagccgcgtattcgtggaggacaaggctctgattttcaatgctcaggctgtcgtacttgtaatcctcgatggagaggcggatgtagagggcgattacatatttctgcattgttccagcacctccgcataggtttcaaactcgctctggaagcgatagcgcaccgtaatctgcttgtcgtgggatacctcaatgcggtcgatcagtcgctcgataagtgcgccggtcagcgcacggtcggtcttgatttgtgcggcgtcctgttccagcgcccggtgctgctctgtttgagcatccatcgttcgcaggccatcctccaactgttccatttccacggcgaggtcggcaatgcggctttcgtacttctccttgtagtcgaagtattcatccttggtaagaacgccttgcacaaggttttcatataagctccgcacgataccgcgaagccgctggacttcctgcctgcggctggtgatcttctcccgcagctcggcgcggtcagcggcctgccggggcagctccgcaagggagagggtatattgccccagcgccgtatcaagcgcgtcctgaagcatatctgccaacatatccagcaacgcatcctcgcggatggtcacgccggggcaggcatccttgctgattcggctcctgctcagacaatggtagaagtacacatcgtcggacttcttgcggatattccgctgccggtgcaggctgccgccgcaatgggcgcaaaacaccttgcctttgagtaaattcggcgtgtaggctttgacctcccgtgtcttggcgcggctggccgtctgattgagaatttcctgcaccgccgcgaactgttcccggctgatgatggcctcgtgggtgtcccgtaccaccgtccattcctcggcatcggccttgacctgccggtgatccacggttttggtctgcccctgaacgagatctccggtgtagacctcggagcggagaataacgccgactgttcgggtttgccacttgccgctgccgagcaaattttcgtgggtgatcttgccctgcatcttcttatagtggctgggagtgagaacgcccgcttcattcagccgcacggcgatggtattgaggccagcaccctcggaagcccagcggaacatccgctgcaccacaacggcggcaacggggtcgatgataagctggtggcaatcgtcctcggctttcagatagccgtagggagtacgcgcaccgatgaatttgccgtctttcatggcctgccgctgctgcgccctgatcttgcgcccaatgtcgaaagcgtaggcttcgtttatcatgttccgcagcgggataatgataccggaatgggcgtcctccgggttggcggtgtcgaagttttcgttgaccgcaataaagcggatgctgcggatgcggaaatactgctcgatgtaatagccggtgtcgatggtgttccgtcccaaacgggaaaggtctttgacaatcacgcagtttacatgaccggcctcaatatccgagagcatctgctgaaagcccggacggtggaagtttgtccccgtcgcgccgttgtcgatgtaggtatcgtacacgctgatctccgggtactgctccagatagcgggcaataatcatctgctgggtttcaatggatacgctgtgcgtgtgggtatcctccaccgaaaggcggacgtagatcgcggcgcggcaagcggcgtcggcctcctgaacggtcaccgcagccgtttcttttctgctttttcttgccatgctcagcccacctttctctgttcgtaatctttctgctgcgctgccagtgccaaaagctgcaacgcctttttgtattcgtcctcatgggtaaaggtaatatccagctcctttttgccacggacgcggatgctctgtaccatgtgaatgagcgccctgcggtctaaggtttccagcgtggagaactgcgtaaactgtgaaatccagcggttgcgctcactccggttttccaaaacctccgtgagtttttccttgagaacgcggatgctctcgcggatgtcctcggcctgcttggtgtactttgccttataggaagcgtattcttccttggtaagcatacctcccacaaggctctcataaagccgtgccttgaactccagcacctgctccaaccggcgctcgttgtcggtaatgtggtcgctgtattccttggcaagcgcctgattgatgctggactggtcaatgccggtcagcagcgcctccagagaagcaatattgccgatataggctttcaggctgtcccgcacacagtcgatcaggctgctttctttcagcatgaccggatgggcgcagccctttttcttgccggtaggacaataatagtagtggtactccttgccgttcgcacggttggtcttgcgggtcatgcggcttccgcagcacccgcagatcagaataccggagaacaggtacaccgtgtcctcgttgggagaagtgcgggtatccagccccttgatgcgctgcaccagatcaaaatcctgacgggcaatcagcgctttatgggcatccgggacgcgcacccactcggaggcggggcgctgctccatctgcttgatcttgtaatgcggcgtaccctgtttgccctgcaccagcgttccggtataggtttcgtcctgcaagatgcggatgatggtggttgctgaccacttgcagtcggctttgtccgcgtagccctttttcgcgtagggcagaccgttgttcttcttgtacgccagcggggagagaatacccagccggttcagctcagatgcgatcttggaggcgcttgcgccctccagccgcatacggaaaatgtcgcagacaacgcgggcagcgtaggggtcagggacgagcaaattcttgttgtcctcggctttcatgtagccgtacaccgggaacgcgccgacgaaatcgccattgcgccgcttcacgtccagagaagaacgggtcttgatggaaatgtcccggcagtaggcttcattcataatgttcttgaccgatacggtcagatcatcgccgctgtcgtgggcggtgtcgatgctgtcggtgatagcgatgaaacgcaccccgtaggccgggaatacccggcgcagataccggcctgtttcgatgtactcgcgccctaagcgggagaggtcttttacaatgacgcagttgatgttgccatcggtgacatcctgcatcatttccttgaacgcggggcggtcaaagatgatgccgctgtatccatcgtcgatcttttcggaaacgacctcaatatccgggttacgctctacaaagttttcaatgagcttgcgctgattggaaacgctgtcgctttcgctggaatgatcgtcggtgtaggacaggcggatgtaagcggtagctttgtatttaggcatgaaaaagcactcctttctcccggactgctcccgcatgaaaagagtggttatctggctattaggttttcatccttttccacaccgatcatagcactctctgcggaaaaaagcgaggatgtcgctcagcgcaaaatgccttgcagacattcctccaacgtaacgccgttcccggcaaagcaggcgtttaccacaaaatcgccgcagcggaagcggtaaggatttttgatctggcggataaaggcgacaatgcgttcttccttgggaagatttttgtctacggatacttcccggatgtccaccagttcatccgtgtggatttgggtttcgtttggcgtcggctgcatcatggcgatctcctttctcggtttggtgggtttcctcaaggtcacatgaatgcgctgacggaaaggccgtcagcgcatggtatctgactttgagaggcggctgcgcgggtagaattggagccacataacataacggcgaataccggcgcagccgctctgcttgtccatttgagaagatccatcctatttgccacgcgccccggatagtgggcatgatgcaggccgcccttggcagggctgtcataactccacgataccgctgcctcaaagagctggcgcataccgcagggttccccctcaagtctgtgggagggcgtgagcaagtttcattatccgccgcgctgtcatcgcgcccgatttgccgaatcgggtctaaggctgcgtagatcgctcggatggcttttccggaatcacctccttgaagccatcgtcgtggcggcgcaccttatgccgctatcacgcgggttttgtgcctgcatcatggtctattcagttttcaacgttcaacgaaaggcttcgtggagaatgtcccttcacctatcgccgattttgggccacttttgcaaggtgtttttgaaaaacctcagaaatattttttgatttttctgattgctgctgtaatgttgagagaaatagcctgatgcgacacgccttcgacttttccaatctcgtcaatcgtcattccatccacgaaatacatccacatcctgcggaactgagtgtccgtcaggtgcttcctgatttgcgtaaccttttgggtgctacggcggatttccgccacccggtcatgcgcctgctccatgcagatatccgcagcgggaatagatgctgcttcctcggaaagctcgtccagtgcaagggtatgattagcgtagacatgatcctctttctcggaagcatgatagtctgcatccgacagggacttccatttcagaaattcttcctcgctggcaaagtcctcgcgggtcaggcggatgatggcttcgttggcatccatgtaaacgatagcgttggggtctttcttgttcagcgcatagctgctctttctgttaaacataatatgtcctccgtttcggtgttgggtgggtggtgaaccagaccaacaccggcggagaacgacagccgacaggaaaacgtaaaaaggcgctcgaacaggcatgatgacctgaacgagcgccttgcgtgcgagtgaaaacatgagtaacgaatactgtaccgggaggggctaaatcacggatgaaccaaaccgcataaaaagagagctgcaactcgctttcgtgagtgcagctcgtctgggggatagccgcgtgctttttgaagtggacggctaatcggtgcttatgcttttttacatgaccgcgagcggccttagcagtatctcctgttcatccgtgacatcataaaattacctccaactcgctaaatatgatttgtggctcattcaatgtgagcttcatgtgtatttaagtgaattgaggctcactctacaatgtagtagaggtgatttacaatgaactttcttgacctgttcgcccaaaagcttcgcgaaaagcgggagcagaaaaagatcacgcagcgcgaattagcggaacggcttaatatgtgtacccgaactgtcattgagattgaaaagtgcaagagcaatccgaaatttgaaacggttgcgctgatttcagaagaaatggacatcagtctggatggaatcgtgttccacgatagagcgccgcagaccgttgccaagtgcgttcttgattactttgcaggaaagggtgaagaagagtcgcaacggtacatagacctgtgcatgagcgcagataagctgaagtgatgtacaggggaaaacaaaagggccgatgattgtctttcatgtagagcagccagtgggcttatattttccccactggctgctcttgtccgcacagttggaacgacgggcattagtatcctatttttcctgtttgtgtgcatcccggatcttttcaaaggtgtcctgactgatggcgtgttcaatccggcaagcatctcgctctgcaatttcagggtcaacgccagctgcgataaattgctctgtaaagaactgatgccgctcataaattttttcggcaacattccggcctgtttcggtcaaatgcaaaacgtaatcactatctaccgttaaaaagcccccttcacgcaaagccgacaccgcatagcttacactggcttttgaaactccaacacgccgtgcaacatcaatagagcggacagcaccgtgattcttttgaagaaccagcacagcctccagataatcctctccggacgcatgaatcatcactattgtctcctttatgcaaggctccagccggaggactttttacggatatttacaaaatcctgataaatcccggcttttgccataagctcgtcatgggttccctgttcgctgatccgtccatcggagatcaccaaaatctgatctgcctgacggatggtattcaggcggtgtgcaatcacaagcaatgttttaccctttaccagttcattgattgcctcctggatatagctttcattatcggtatcaacacttgcagtcgcttcatccaaaatgacaatcggtgcgtccttcaaaatgcagcgggcgatagagattctttgcttttcgccgccggacagagtagcgccgccttcaccgatgactgtctggaatccatccggcagcgccatgataaaatcatagcagcgggctttttttgcagcctcatagacttcttcctcagtagcgtccggtttacccatgctgatattgttgtaaatggtatcctggaacaagtacaccctctggaaaaccatgctgatctgttccatcagttcagcgagaggtacatcccgaatatctgtactacggattgtcactttgccggatttcacatcccacagacgcgccagtaagtttgcaatcgtggatttgccgccgccagacggtcccacaagtgcggtcatggtattcttctgcatagagaagctgatattgtgcaggacttccttgtcctgataggcaaaagtcacattatcaaaacagatttccggtgagccggagctttcattcggaatatgtgccgtccctttatccggcaactctgtttcattcagaaccgcttcaatacggtctaaagcagcgttcataaccgtgaggcgcgaggcttctccatacagtgcctttaacgggctgaacagatcaaagacaaagagcagaacgccaagcagataaggcagcgaaagggaaccgctttgctgaagccaaacggaaagcgcaaaaatagcggcgattccgactgcgtacaaaatattcaggcctcttgtccacggcgtcattttacgttcaaaggcagtggatgtatctctggaacgtctgaaattcccggttaattcctccgacttttcgccaatcaggttatagctcttaattacgctaatcccctctgcaaaggaaagaactgcgtccgtcaaatgttcgctttgatcctgtctgcaagctgcttcttttaaggaaaccttgttcatcccttttgcggtaaaacatgccagcagcgttacagcagccgcagccagaccaagccgccagtccagaaagaacataaataccagcaagataagtgcagagagcatgtagctcatcatattgccaagtgtactcatggcaatttcttcaatgaataccatatccgtactaagtaccgaactgatcttgccaatgttgcccgaagtaaaataacccatcggcagcttgcggagatgaccgccgagctccatccgcttatccgtaaaaatcatatatccggcagcgctttgcagtctgtcacagagataatggacaatcacctgtgcagccacaacgccaacaagtccgataccgatatacagacattttgtgcctgtcaatgttttctgatagaatccagagagcacaagaaaggctaaaaagataggcatttttgaaagtatggattcgagaaaagcacatacgaaagccccctgaatccggcacttatacttgccggagagttttaggattcttgaaaatagtgccagcatttattttccctcctttacagcgttgactttccattctgcgctgtcctgcgaggctttccacagttttttgtattcctcacagattgccagcagttcagcatgagtgccggttgccgccagtttgccatgttcgatcacacaaatctgatcggcgttcataattgcaggaagtttgtgggcgatcacaaataaggtcttgccttttaccaattccgcaatcgcagcctccatcttttcctcattctccgggtctgcatatgcagtcgcttcatccaacacgatgataggagcgtttttcaaaatggctcgcgccaaagaaatacgctgtcgttgaccgccagaaagcattttcccggcatctcccgccatcgaatgaatcccctgcggcagcttttcaagaaattccatgcactgtgcttttttcgccgcttcaaggacttcttcatctgtagcgtctggccgcccaatacggatattttcaagaatggaagtattgaataaatactgatcctgcgccacgtaggaaacctgactgttcaatgcctctaagctcatttccgttattttttgcccaccaatggaaatgctgccctgctgcgggtcgtagtagtgaatcagcagtttcgccaacgtactttttccggagccggattcaccaactaaggccgttttctgtcctgcctttgcagtaaaactaatatcatggataacttcatccattgttaccatcggctgtccatcaggttccggctgacttttctcatacccgaatgtaatgtgatcgaaacaaatgtcgtaattcttcccatgaaaaacggcgtccgtctgctgtaacggcgctgtttccaacacttgctccaaagcggcaatcttataattgagctgcggcatagtcggtaaaaagctcaaagatttcagcagcggaataccaatactaagcgacaggcaaagcaccaaaatcaaatccggcagagtggagaatccacaaagtacaaaccatgcccccaaaggcagagtaaggataatcgtacagggtaaaaggctgctgtaaattgccatccacggccatgctgccttataccattccagcgtatagtcccgataatcggaaatgtctttgcggaaacgctcataggattctgcgtccttgttgaacactttcacaacttccataccgttgatatactcaataatggtattgttcattttctgcccagccatgtaatacggccccattttcttcataccaacggaatacataatcatcatagccgcaaagctgatcggaatagacgcaagagatagcagggccagtttccagtcgatgaaaaacatagcaacataaattgcaatcggaatcatcaggtttgcaatcccctccggcaaagagtgggcaagcaatacttccagactgtccacatcatccacaaacagctttttaattgtgccggttcccttatcctggataaatccaagtggaactgcttcaaatctcttttgcagggaagtgcgaagccggagcagcgtgctataagcggccttatgggatacatccagtccccagccataaagaatggcctgtaaaataaggcagatcaaaacgccgattacccgtatgcacacatatttggtatcaacggcattgcccatgacaagaggcgagatcacctgataggccagcacaaagggaagtacccccatcaggacgctaagcaggacgatgaaagttgctatatataagtcctttttgtgcggcccggcatactcaaatactttcttgaacataacaaagcctccaatcaattaaagtattgttttgaaagtgacagcaagatttccggggttaagacctgattcttaatcgaatcctgaccatcaagctgtaacacttctgaacaggtgcgggtaataaattcaaaatcatgcgacacaacgaaaataatcacaccggctgctgcaagctgctcgatcaaatggcttaccctcaccatagaatcgtagtcaaggccgctggtgggttcatcaaaatagatgaccggactgtccttgacaatggcagcgcctatcgtcacccgctgtttctgtcctcctgataaggacgcaggatgacactcccggtatgcgccaagttccagagcctctaaagtttccgtgactttcccggagcagtcattttcaattcccaatgataattcttcttccacgctgctgccaaaaagctgataatcggtatcctgcatgacaagataggacaggttccttctctggcgcggggacagctttttgccgttataacggatactcccggttttctcttttagaaggcctgtcataatcgagagcaaggtggtttttccggctccgttatgccccaaaataccaatcacatcacctttatgggcttcaaaattgatattccgtaaaacatccggcccctttttatatgcaaaggagaggttgcttacactcaatccatcattggatttatgtgccggttttagctgatacttcgctgcctcccgttctggatagactgtacgcaatccgtattggatacgggtttcatcggacaatgagcaaaactgttctcttgtgaagctctgtataagcctgccatcctgaatcagatatgcccggtcaagcaactccctcaaatagtagaaacgatgctcaacaacaataatggtatatccatcagctttcaggcgcttcatggtttctgccagacgttttgtggcagcatagtctaaattcgctgacggttcatcaaagatatatactttaggcaaaagggcatagactgaaccaatcgcgatctgctgcttttcgccgctggataaatcaaaaatactgcggttcagataatcgcttagttccaaatccagcaccgcttttgcaatgcggtcaacggtttcctcacgggaataccccatattttcgcacccgaaagcaagctcccgtgtggtatctgtcataaaaaactgtgaacgtggatcttggaatacggtccccaccttacccgctaaatcagacggcttcaattccagcaaagagtgtccgtccaacagaatatccccctttgactctccggggtagaaatgtggaatcaacccattcaggcagcgaatcagggtagttttcccgcacccgctccgacctgtcaataaaacaaattcgcctgtctgtattgtcaggttcagatctttcaatgtaaatttatccctttcctcatagcggaaagagaaattatcaaaggtaatcatcgctataccctccatataatgatttccccaatagaggtatggtcgaggaacagaagtagcgctaaaaagacaattcccagcgcagtcactgcatactctttccacgaaaaacggacagggttcagcgcatatctctttccttccagttccaatccccgcgttgtgccggatgctgctaattcatcggttactttcaggcaacgcatcagcaaagggatcagaatatattcaatcgtagcaagcggatggataagttgtttccataccgtatcaccgatgccgcgaatgtccattgtattacgaatcatgcggtattcaatccgtaaagtaggtatgtagcggaacatgaccactaacggaattgtaacagcctgcggcaatcgcatgcgttgcagcgataccatgagatcatccatttgtgttgtgtgcaaaatccatattcccatcattgcaataggaaccagtttcaaaatggtcacaccaaacacactcatgatcacgctgagtaccggaatagaaacataccgcagtaaggcattgagataggcaatgacaatataaaaaatcagcatcttggcggcccattttccgccattgccgacagcaatgaatagcgcaaaagatgcaacaagtaccaaactgcaaatttcgccattcagaaaataactgacacatccgatcataatcagcagcgcaactttgcaccgtgggtctaaagctgccgttctttgaaattgtctttgtgtaatgagtttctttgtgttttcttccatactgttctccaaaaaaaagcggggctgacattgcagccccgcttttgattcaggcactctactgacaaatctggcgtctgtcagttttcggagctgttacttcaccgatacaagtccggccttaataaagtgcttcttcaatgctttctggccgatataaccgccaatcaagccaccgagcaagccagccactataatgacaacaggcataaatccagatgtaatgctaatcatgccatctatgtattcctgcgcaatgttgttcttttccatcgcccctacaaaagcgtcctgcaggaagctcataggccctacaattgcaccaaaagcaaagataccgctgaaaatcgtgtaggcaatcatcatggacttcattgtgatttcttttcttcccataatcaaaaaatcacaaatgacaccgcctacaatcaatgcaaccgggataagccaaaatccgccgaccagcaggaacaggattccctggattgtgccgcagatggtgaacacgcctttcttcgggacttttgccagcaacagcatcatcacgattccgttggggattgctacgacagcaggataaaatacgttggtaacgggtccggcaatgctcattacggtgctgataatcatgcaaatgatccacatgagcgcagtcagaacgccgatcaggataaaatcctttgcattcaacttcttattcatggttgttcctcctaaaattaaaatgcgtggtgtggttagagtgttctaaccacaccacgcattttagcaatttcatgtccaatatccaacccaaaagcaatttcattctaccccaaatcggtatttattttgggtatgcaaagcacctatttgattcggctggcctctcgataatcttttggcataactccatactttttcttaaatgcagcagaaaagttgctgggctttgtataacccacaagaaccgctatctgcccaatgttcatattgctctccaataacaatcctgcggcccgctctaaccgctgctcaataacatacgcatgaaccgaaatgccgtacatcatggagaatccccttgataatttagagacgctgatttgaacctgccttgccagtccttcacagcttggcgcaaaggcaagctcgctgtcaatgattctctttgcctcgatgatgcaatcacgttcactttttgatatgcagcagtattccggcgagaggattcgcagctccaacacttcgctcaaatatactgacagcaattcgtggattttgctttccagaaacagatacccaagcccaccccgataatgtgtaaagtcttgtaactctgcgaaaatatgctccatatagggcgttatgctcacctttgaaattccggtcagcagtttcttttcatagacggtaatctcgccatcctcgaagtagtcctgtaataaacgtttgaaatatggaacgggaattttgatgttcttaaaatagaagtcgctgttttgcgcataacagagagactccattttcccgtgtccacggtaaatgcaggattctccctttgcaagacaagcgccctctctgctgcctgcaatattccacgacacgccgtcgttcaggcagaacagcatttgaatatagtcctcgctgttaatcccgcgcacattcatgtcagaaaaataattcatcttccagtctgaaacaacggcaccctgttttgtcaccacctgcgcaatttgtccggttcccatatcagaaggaatcgggatcgttacggtctgcggtgaattggagagcagatcccgatagaggttgttcatgtattcgcttgtcattggatgccctccttttttcggttagcagtgactaatgtactaatatagtttacacgatttacgcctgaaagtcaattttcagcacgaatgcaagctgctacagaaaaaatcagggacgttcccgcaggggcagagtgccatgtcgcgcagttcgggtacgacgaggcgcagacgcagacacggtcaaccggccgcgtgcgaggcgaagcgttacgctatatgcggcatcgaaaaccacggcttcagaggggttacgaacgggaacaagaaactggcaagcaatgcaaagcggtacccactttgcgaaaacaggcggattccgtttacacggaacccgcctgtttcatgcttgttggggcgttgccccaatcccctcagaacacaaaaactgtgttctggaacgatggataaatccatcggctgcgcgattttgcaaatcgcttatgggcgggcagctcagcgctgctctgcctctttttcccgtcgttcattcgcttcctcctgctccttatccaactccagaatacggtcgatattggccttggccgtcagcagctctttcatttcctcacgggcttttcggtagtcggcgtaggccgctttcttctccgccagcagctcggcgtactcggtattcagcgccttgatggtgggcagcttcttgaagcccagtccatcaaaatagttctttgcggccttgtggatcgtgatctcgctttcatgctctacaagaaatttcttggagtacccggccttgcgataggcaacgtaggtatcgcgggtcttagcgtaacccacgatatgctcccgcagcacggcaatctcggccatgcgtgtttccgcagatttgatccttgcggaaagctcgttgaagtgagcggacgctgccgccgctttctccgagagaatggcgtaatctaacagctcatggtcttgcagataggccaccgtctgtgccatctgtttcaggttaaataacgtcgcccaacgcgcataaccggcacccttgccagcgcgtaatttggtctgaatgtccaccagcagattcccgctgcgcttttccggtttgaccggcgctgcggcgctctttcgcggcgtatgcgccttttcacctgcaatcaccgcacgaagatctgcgggagtataaccgtcgccgagggtatccatgcgaatggactttttctgttcgccgcctaacaggggcgggactttcttgcccttgatctcatacccggcctgccgcagcagctccagcagcgtttcaaagctatcgggcttttgtgtcagcgcatcgtcaatggccgcgcagattcgctcccggtgggagggcttctttttgtcgcccagccacttgttgtagctcttgccttggcgcttcggattctccacgatggagtagccgttctcgatgcagatggtatcgttgagccgccgcacggcgcggctgctgccccaaaagtttctgaatttccgggtctggctgagtgcggtggagttccagatcacatgattgtgaatatgggctttgtcgatatgggtgcagacgatataggcgtgattgcccttggtgaagcgcttggccagctcacagcccaaacggttcgcgtcctccggtgtgatctctccgggaacaaaggattgccgcagatggtaggcgatcacatcatcctcgccgcgcactctgccggtcttttgggtgtattgatttttggcgaaaaggaactcggcatcggcgatcctgctgtcgcactgccagctcgtaatcagcctgccgccgtctgtcttttgcggattttcggtgtagtcgatgatggcgctgatggcctgccccaccgtgcggcctttgccggtgtgcaggggcatcaggcgcgtggttgccatgttgaacacctccttgaaaagtaaaacggcctgccgaagcagaccgttttattcttcatttatcggattgatagcggataatcggaacctgttttacctttcctccaatggttcgtcgttccagagcaaagatcatatcaggggtgcgttcgaaaaagccttcgtcctttttccagctcatgccgcatttgcaatgctgcaagcctatgaactgctgcttcatctttctgccgcagttcgggcagaccttattactgtttcccatattattcagcccgcgctaatctatatagactgcggatggattccacgaccgtatgccacgacaggtcggcagcataggagaacttcttctgataagcctgccacagcttttccatatttgggtcggcctcgacttcatcaaaggccgcaggcgcgtcggcaagatacttctctgtaccgcgtttcttggccgttgcaatgagcgccgcccggagatcagcagggacgatgctctggccgtggagctggctcagaatgtgcagatcatagaaatctctcatgcgggtgttggtggtggcgcgggacacgacggtttccagcttttcagccagaacggtttccagattgtacgcccaaatctcaatggagcgatcctccagcatcagcttgaagctgtaacgcacttcgcggggcgtgatagcgtcaccggtggaaatgtcgattttgagcggcgttattacgccgtcaaactccgtttccatgctgatgcggatgcccggatactcggcttcgtccatgatctcggaaatgcgcttcacacggaactctacgccatcgtccaccggcacggagatgatggaggcaatcatattctccacttcctcgatgccgaccgtcgcaccctttacggtcgcgtcaatgtccatcgtggagcgggcgtcaaggccgaccattgcagccaccagcatcccgcctttaaggatgaacttgtcccgatattccgaaagagaaatgcgctccagaaagcgctccatcatgtaattgcgcatcaggatttgcgcatctgcggatttgtccttggagagattgcgtatcaggtctttgagctgccgtgcagtcttaatcataagagtacctccaaatactgccgaagcagtttttcaacacggaacatctgcgcatagcgcatcagcttccgcaagtccttgtcttttcgttttgcgtattgcttgagtgcatcctgaaaggtctgcatctcgattccactgcggctgcggatcagatcgcagatggtacgctccatatcatagacgggaaccgggttgccaaagggcgtgttcatcgtgacgatccccacatcatgcaattctttcttgatggtgtagaccttgatgccgtctgcttgcaggctggcaggattgtagccggtcttgaccgtgatggaatacggattcggctcccggtcggtcaggtcatggaaaaacagcgcgctttcatgggagaatacggcctgcgcacagcgaaggtgcagcaggtacatggcgtccgtccatgcgtcaggcgaaacataaacaccgtgcgcggcctgctctacgccgtgctgcttggcgtaggcgtaaaacgtggacttggaaataccgatttccaaaacctgcgcggttttgacgatcccattgttttgctgaaaaagcagatcaagccggtcgtaggcggtcatgttatcacttccttcttgctaatattatatccgatattagcaagaaagtaaacaacgattttagaaaagcaagccgaggcgttcgccccggcttgtgttttaactatgaatgaagtttttcatggcggtgttcatgtcttgcagcttgccaagcccctgcacagccagcagcggaagtcccatcgggctgatcagaaacgccagcataaggaggatgatgccgttctttacggagtaggtaatcagcacggcgaaagccagcagggagagcagtccgcttgccagtttgaacacgaagccggagcaggacagcagccctgcgcacagccaaacgaacagggacaggataagcgacagcggcgcaaagagaattttcaggatgaacattttgcggcctccttttcacaaagtgcggtcagcgcgtcacgctctttggcgagcttttcttcttccttttcggtcaaatcacgatcaccgcccgtgatctccagctcgcggaagctctcataggcgtttaacaaagaatcccgcagcgcttcgggcgtagggcaaaagtccacggtgttccagtcctgacggtggttgtcaaaacccatgaccgtgtagcctctgctggtcaggacaacttcaaaatccgtatcgcggttgaggtagtcagaaaatactttcagcacaatttcgtttgtcagcatacgttccgcagctcctttccaagcagtcaaatctttttctgatattagaatactttgcccattggtgttttgcaaggatgcggcaaagtcatacgaatagttttcgccttttgcccgacatctaaccatatcacataatccttctttagtacagctacctgaactaattttctccagatgggaaatataatattggtacagttacagggacgggaggtgtggtacttgcagttgaatgaagccgtcagcaggcgtttggttgagctgatgcaggagcgtggcatgacgcagtatcagctttatatgaaaagcggcgtaccgaagtccaccatcggtaatcttgtgaactgcgcatacccgtctatgaagctgcggatcatccacgagctttgtcagggattggagatcgacctgagcagcttttttgcctcgccgctgtttgatgaaaacaatctggaaccgtagaagctccgatgctgttttgcgtcggggcttttgcttttgtgtgaacaggggcggcggagtgaccgccgcccctgcgacttatttcagcgccgccagcgaggaaacgattttctctgccgccgtccatatccgttcctgactttgctgaatgtcctccagatcggtttcgtagatacggcctgtttcgtgggcgcggcgggtgagctggttgaggttgttgctggaataccgaagcagggacaccagctcccgcagctccggaaggtcgagcttcaccacatatccgtcaatcgccatcttgcggagatacgccgccatgttggtggtgccgaactgcgccatctttgtttcgatcatttcccgttcctgcggcgtgacgcggaatttaagctgaatatcccgcttgcgttttgccatcgctcagcgctccggggctttggacttcgccgaaattttcggcgaagttgtttcaggcggctttttcagcttatcccggacagaggttttctgccgctcctgcgcgtaggctttgcgggtctggctgagaaacagatcgaccagaccgggatggctgttgacggccagatagcagttgcggtcagtaccccatgtgtcgggattggcggggatggacatggcgtttgcccatgcccggttgtcgggtgaataccgtctgtcccaatccgcttgacagacggtgatggcaaggacatggaacgtgcggtcatagccgaactgctgcaccacctgatcgaccgccgctgcatccagccggttatcccggtagtggtcacggatggcggcttcaatcgcttccttgcaggccgtgttcgcttgattggaagcgcggtaggccgcaagctcgtcatgctctctggcgtaggctgccgggtgcttgtaaacggggagatttttcattatcgtgcctccatttcttttttgtggggcttttccggtgcgccatgaacaggcgacgctttcagcctatccagaacggaaggccgcgcagattttgcaatcgcctgctcaggctgcggctgtcccttgccgtccaaattcagctccatatccagctcaatcagccgcgccgttttcgcggccagctcctgctcctgcgggaacggcttaccgacctcagcctttgccgctgcctgctggttatagaggttttcaagctgctcctgaacgctgcgcagacgctccggcattttatccagcgcgttctcgatgcggacaaggttgcctctggcatccgaaccgagttcaacgcgatgggtcatccggcctttcagcgtcagcgtgtacgttttccacatggaatcaaaagcaacggacatggtaaagccgcgatagctgccgatctgtaccgggtctttgcccttgacctccttgcaggtgtccagcaacgcggcaccggcgttttccttatcggtgagccggtcgctgcgaatctccatgccgacaaagccctctgccgggagcggatgcgccgcgagggtctgcatatccgcctccagcccacgaacaaagcccttgtgttcttctatcttttccggaaagtatttcagcagactatcctccaagcggaattgcttgctgttgtggtctgccttcataattttgagcttggacacctcaatgtccaaatccatgcgctccttgatgcggggatcaccggcacacagcgccttgatctccgcaaaggacagcgccgtagcgtccacgtcctcgcaggagcgaaccggggattttgaggtcatgatctgagagatgaatttctgcttattttccaccgtttgccagaggtaggcgtcaaacgtcccctcggtcacatagcggcagacatgaacgagcttgttctgattgccctgacgctcaatgcggccttttcgctgtgtgagatcacgaggacgccacgggcaatccaaatcgtgaagtgcgaccaaacgatcctgcacgttggttcctgcgcccattttggccgtgctgcccatcaggacgcgcacctgaccactcctgacttttgcgaacagttcccgctttttgacctccgtgttggcgtcgtgtatgaacgcgatctgttccgggggcataccggcgtcaatgagcttttggcgcacatcctcatagaccgtgaacggcgtgtcagagctttcctccaatgaaatcgcgctctccagcgcatgaatttccgggctgtccagcgtaccgggggaagcctttgccgcccgctgcgagggcgtggtctttggcgtagaaatgtcgcaaaacacaagctgtgtcagtttttcctcctcgccgtcacgccagtattggagaatgttcgccacacattgattgaccttggtggtttcctcatcggggagcatgggattgatgatgcgctggtcaagccccagcttgcgtccgtccgaggtaattttgagcatattgtccacatccgggctgaccgcaccgctgtgtaccttggacgctcgttccgagagggctttcaccatgtcctgctggatctgcgtgggtttggtggcgatggtgtgatacgcaacctccggcgtgggcaagtggagctgatccgccgttttgatgtcggcgacctctttgaacagattcatcaattcgggcaagttgaaaaactttgcaaagcgcgtccttgcccggtagccggttccctccggggcaagctccagcgcggtggtggtttcaccaaagcggcttgcccagcaatcgaagtggcccatacccatctctcgcagccggtcatgctgcaaatagcgctggatggtgtaaagctccgtcatggagttggaaaccggggtgccggtggcaaataccacgccgcgcccgccggtcagctcatccatgtagcggcacttggagaacatatccgaggatttctgcgcatcggtggtggaaagccctgccacattgcgcatcttcgtatagaggaaaagatttttataattgtccgactcgtccacaaacatccggtctacgccaagttgttcaaagtaaatcacatcatccttgcggtcgctggcttgcagctttttcagccgtgcctccagtccctttttcgtgcgctccaaactcttgatggtgaagctgttgccgcctgcgagcttggtatcctgaataccatcggtgatttcctcaatctgctggtgaaggagccgttcctgctgctccggactgatggggatacgctcaaactggctgtggccgatgataacggcgtcatagtcgccggtggcgatacgggcgcagaatttcttgcggttgtgggtttcaaagtccttcttggtagtgacaaggatgttggccgaagggtagagccgcagaaactcggatgcccactgttccgtcagatggttcggcacgacaaaaatggatttctggcacagtcccaacctcttagattccatcgcagaggctaccatttcaaaggtttttcccgcgccaacttcgtgtgccagcagcgtattcccgccgtacagcacatgggcgatggcgtttttctgatgctctcggagggtgatttccgggttcatcccagagaaaacgatgtggctgccgtcatactcgcggggacgagtgctgttcatttcctcgttgtattgccgtaccagcgtttcgcgccgctccgggtctttccaaatccagtccttgaacgcatcccggataagctgctgcttctgcgcggcaagggtggtttccttggcgttgaggacacggcgctcccgtccgtctgcatcctcaatggtatcgtagatgcgaatgtcgcggaggttcagtgcatcctccagcagccgataggcgctggcgcggtctgtgccgtaggtggtgaatgccgccacgtcgttgtagcgcaccatgctcttgcgggaaacctgccattctgcggtgtacgggacatagctgatctcgatctgtccgcgcagatagcggggcgtttcaaaggtttcgtacatgaattgctcgatgtacttcttatcaaaccatgtcgcacccagccgcacctcaatctcactggcttcaaggtctttcggctgggcagcaatcagggcgtccacattcccagcgaagaatgggtcgcgcgctgccacacgctgcgcggtgcgaagcttctgccggacgttgccagagagatattcgtccgccgtttgccagcccttcgcccaatgctcgccgccgtcctccaagtcaaacgggccgctgttgggttccttgtaaatgacacccttcaaatcctcaacgatctgcgggattttctcgctgccgcccatgagggaggccatgaagtcgagatcgacacaggctttttctccgatgcagacagcaagggcttcgctggcggtatccacagaatctacgctgcgctgctgcttgatagtgcgcttgtggaacatatccgccttgcgctccagctttccgtcgtcatccagcacttccagcgaacacaggaggtagtaagaggaatcgtcagagaacgcaagacggttcgcacggtcattgattaggccatgttttgcggagaacgcatcatagaggcggtttagctcggtctgcgcttcctgaatccggctttctgcgctgtactcgtccatttgcagggcaatcagctcattcacgcaatcccgcagcgcgaccatgcccttgacacgctcggcggcggtggcgttcagctccggtttgaccatgcggctgttttcccggtagtacacctcgccgtccaccacggtgtaggagtagtttttcacattggggtctgcggggatggacgtgtcgatctgttcgccctcgcccagctctggcagttccgcctcctgataggtgccgcgaatgtttttcacggcatcatggagctgatctgcaagtgccagcccctcaatggggacaacggtaaaatcctgcttgccgtattgggtgctttcagaggcctgcctgccgaggatcatctccgggtggtcaacaaaatagcggttgatggcaaagccatcctcgttctgaccgaggtgtacccaatccggttcgatctcaatgggacggtcacgcttttggagaaagagaatgtccgaaaccacatccgtaccggcgttggcgcggaacgcattgttgggcagacgaatggcacccagcagctccgcccgctgcgcgatgtacctgcggacttcgggtgattgcttgtccatcgtgtagcgggaggtcacaaacgcgatcacgccgcccggacgcacttggtcgagggttttggcaaagaagtagtcgtgaatggaaaaaccgagcttgttataagcccggtcatctacctgatattgtccgaacgggacgttgcccacggcgaggtcgtaaaagtcttttctgtccgttgtttcaaagcccgcgatggtaatgtccgccttgggataaagctgcttggcaatacgtccggtgatgctgtccagctccacaccgtagagcttgctgccctgcatctgctccggcagcaggccaaaaaagttgccaacgcccatagacggctccagaatgttaccgctctggaagcccatattgccgaccgcttcatagatcgccttgatgacggtagggctggtgtagtgggcgttcagcgtggacgctctggccgcagcgtattcctccggggagagtgtggcgtacagctctgcaaactcgtccgaccagtttggcttattctcgtcgaaggcatccgcaagaccgccccagcccacatagcgggagaggatttcctgctgctccgggctggcctgtaagccctcaaactccagctcttgcaggaggtggatcgccgccatatttgcccgaaactttgcttttgcgccgccgacgccgagggcatcatcagtgatgtgaaaattctgcgcgtcgcggtggcttgccgccttgaagtcagcgtaagcggcctgctccgcagcggcaatgctgggaaagccctgccactcgccgtcaacgggaatagataccgcaggacggtgtgcgggaggctcgtcgatctcagcctgagagatggcatcatcaaaatcaggcacaaactcgcccatttccgagagtgccgcgcgcccttcctgctccagaatcagcctttcttcatcgctcatggcgggcggttcaggctcggcgggttccgcagagggcgggtcatgctccggttccgggatgtgcagcgtttggatttctatgtcgtagggcaagtgcgttttctcggcaggatagaacgcgacgggtttggtgacaggctgcggctgctcccgttcctgctcttcaacaaacgagcgtataaacgcaatgtgttcagcgcggaagatgggaaagccctgcctgttttgaaaagtcacatcgcgcagagatacttcatccgtgctgaaatttacgctgtcaatgacaaacttccgtccgtcaatctccagctccatgccaatggggatatactccttggcatcggcctcgttgaaaacatcatagccgtcggtttcatttggctgcgcaaacacgaaactgtgtccatgctccagcagccgctttgcggcgcttgcccattgtccaaaatcatagccggtcacagcggtttcgcccataccgggaatatcgcgttgcagcaggcggcgattcaaagcgctggcggcgcgttctgcatccgcgtcataaaaaagcagccgttctccgacacggacaccgatgagcttttcgggatgctctgcacgaagcgcctgatatgccgaaatattcggcgcaagctcacgaccctgatctgcaattcgtgtgaggacagcagaaaccggttcggttctgtgttccggatcgtgattgctctcgctggaggatgaaacgacgctgagatgcgcgatagtttcatctgcggaatcaacattatagagcttaccatcaatttccacgcgctgccccataaggttttgaaccgcttgcggcgtctccggggttggctgttctgtgtgctgcgccgcaatgacgcgctgcggctccggttcagaaacctcgaaatatctggtgtcgaggtagcgttcaaaggaattgcggtcgatgctgacaggttcctgtccgggtacgttcggtaacgtgtgccagacgtgatcttcatctacacgcgcgataacgccgactgctgctatgtggtctaactctatggatgaaatgcgatctccaatatgataagtatagccaagcggtgttgtaaacgccggaggggatagctcaattcccatatcccgtttgatgccatccaagtaagcaatggcgttattctgttctgcaaagcggagcgtttgttccccatctccgcagaaccgttccaacacctcatcccaaatgccggtaattccgccctcgccgggatgcagacgaatggagtatcggtcaggtgaaaataaccgcagtcgctcattctcatcgtaaaatttattctcgcggatgagctgtgccaaccgccgctgtacctgcgcccatgtgagcgtcaccggctcggcgtttcctacatggatatacatgggagttttgctatcttcccagccatattttgtagccagccatgcggcggtgctgcgttctcgcccatgcgcctgcatatatagtgcgacttcctgcttgccctttaggttgttgtgccaatccagaagcgcgttgtcaatgtcctcctgtgtgatctgatagggagagggtgcgaccgtcgctgccagcgtgggatacagttcctccaaaagctcctgatgcagccggttatggaacgcgggcatatcaaagtacaggcggacaagctggagatcatcagatgccgtgacaatacgacggatagcgtccgcgccctccagataagcgttctggcggtctgaattgcggcaggcattgacaaaagccgtatctttggaaagcgagttgccgacggtcagcttgtacccgtcaaacagctctcgcacggtaggctgtggtggcagctcggcggcgtggtcgcggaacacccgcgtcccatccgcgccgaactccgcttcataggcattgatggcctgttctgcctcgtggtcgatggacggaagcgtatatgccgtgtgttcatggctggaatcgccaatgcgcgaaattgttacatcatgcttttcccgcagcttttcaacgtatttctccaaatcctttgcagggaagccgcacatggtaacacggcctactccctccaaattgcggcgcgtcagctcaaggctgagatcatctgcaactgcccgcgcatcctcgccatacagctcgaagaagtccccaacctgatacagcacaatttcatcggggtgcgccgcctttacgtcgttatagtcgttataaaccgcgttccgcatggcgtcctgcgccatttccttgtcataggctgcctgctcatccggcgtaaggtagcggttcaaccgaaccagctccgagatgcgcgaagcgaccttgttccaattcatctgaatgtctgcacagccgttctttttcagcacaatgcctttgctgccgtgatcttcatagctgccgctttctctggatacagcatgggtgcgtcctccgatgccgtattcctttttcagaaaatcagcgctctcttttgtcgtgtgcggagtctggaaaaactcatggatgcgggtctttccaccctcaaagccgcttccatttgcaagagaagccgcaatttcatcttcagtgataaaccggcccgtcttcggaacagccgccatatcggagtgatattctttgcgcggcaatgacagatcttccatacgtgtaagaagcgcctgcggacggtggaaatggaaacgcagaagctcccggttctcacggtatgcgtcaagaaatactctgtgttctgccagaagcctttcccgaaactccggattcagcagatcatccgtcaggcgctccgtttcctctggaaagctggtgctatggatattgcccaagcaggacagataccccagcgattttgcttcatccgagaaatcgtgataaagattccagacatccacagcaatacccagccgctcatagcgcggggcttctgtgacttcaagattggtggcaaatgtgccgccgtccagaagttcctcaatacgctccgccgcatctgcccagcctatcacttgtgcagagcgaagatagcgagaggtatctccggttgcaatatggataccatcgtccccgtaccatgcggaaagcctgccgttatccgtaatcaggccgttgccgccgtagtaaagagctttcagaaatgccgcgcaatcctctaaaggtttttgcttggagaattccgcagcaattttcatccgcgctgcatccgcattaccgcccgcgcgcaggatgtggtcaatatcatcctgagaaatgaacatagaaaaagcggagggtgttacactctccgcttctgcgatggattgaatttgttctgcctctgaggggaagaaggacatctgcgccccagcaggggcatcgaacatatttagctgaacaccagttccgtgaggatcgtttcctcggcctgcgctttcagcgtgttcatcagccctacccacttcatcgggtcgctggctttcagcgcttccgtcacgcctgccgacttcatcagctccggcatcatctgttccagccggttgttcgctgcctcgtcgatctcccgcagatgggggtacagcttctcggacagcagcaggctgttccacagcaccggacgatgctccttcaggtaatccttccgcatcctgccgtacttgcccagcggggcttgcggctgctctgtcaggctcaggtcgggaatcagataatccccgctgcgggtgtaggtcagttcgctcatggctttcgctcctttccgcgattttctcgcgctcataattcttgatggtgacttcgatctgccgcagcaccagctcgctggactggctgatggccgttccaagagcggcgacggtctgcggggtattgaaatcaaagacattcagaaaatcctcatgctcgaagtaatctcccggctgcatcccgcagcgggacagcagcgcataggtggtgctgacaacggcggcgttccgaaaagcggctccgatgttgaactcatcatagtcctccaaaaaggaaccgtcaacgatgccgacaatatcgcgccagttgtcgtgccagtattcatctacaagctgcgccgccacacgctccatctgatcggcaagtccgttttcaccggaaacgtcgaagcgctgttccagcgccgcagataccacctcacgatgctcctgccggtattcccaaagataagggcggcgagagttctcgccgccgctggtatcggaaacatcgaatacatatcggagtttgggttggtcgctgctggtatccacaagggcgatgcccttgctgcctcgccgcacatagcggcgcatctgcttattccaaagatcgtattccgcgcaggccgtggcttccgggcgctgggcgaaaatcatgagctgttcattgtaggggtacttatacagccttgcggcggtggtcagaaatgccgtccacttctggtagcttcccgtgatctgctccgccgtgcggtctgccatctgcgcatagagctgtactttactcggcatccatatcctccttttcaaaatcggggaacaggtcgagcgcgtcatattctgcgtcgctcatcctgcgcagctttgcgatggcgctgtccgtcagctcccgcagctccgtttcatccgcagcgaggtagccgcgcatttcctccagcgccgcgatcaagcccgtgcgggtaccggtgttgtagaggctcataagctggcgttcttcaaaggtgatgttcatatcaaagctccttttccgcgctctttttgggcgctgttttgtgtggacgttcttgggtcggttggcttttgagctgctccagcacagactttttcttttcccggtgtgccgcctctgccaaatccatcagggagatggacataccggccttgacctgtgcttcaaggtcggcgacggtgggctgtttggggccgttgttgataatgccgtcgatcatgccgtaatcatcctccatcgacatttcggcggctttcaggtaattctccggtttctgaaaggcgggcagctcctgaaatcccatgctgtcacagtagtgataggataccttgccgtcctgtttcagcgcaacgatgtcgctgacggagaggctgtgtcccacaaaatcgccggggcgctcgtcgttgaaaatgtagtagaagttttcaaggattctgccggtatcatcgtccgggtacacctcgcgggtatagatggcttcatagttggcagggtcaggcggcgcggccaaactgccgagattggcaaaacgcagctcgaccggcgcatcccggcgcagttgatagatcgccatagaatcggtggggctgttcaaaaagcgctgttccacatcacggggcgggatatggcctttgaccgcatcccaatccggttgtgtgatcccgaacattccgtcatgcttgatgatgtcctcggcctcaaaaaccatttcttcggcgttgtcgggatggagcatataaaccgtgatgtcatgctccagcagctccagcgcccggtctttggaaagcgggagcatatcgccgtccagatacccatagctgcgcatatcgtccaccgtcagcgtggggtcgggcatcggggtggcctgttccagctctggcgaagttggaagtgtgcctgcggcacgagaaccggcctcctcgtgaacaacctgattgtcgtccgatgacaattcgagtgagtacaaaatccctgcaaacttgtttgacaaaacttcaaacggcacggtcttatcatagccatgtgtttcgcagatacgaatcgcagccgccaaaagaaagtttacatcatcgtcatgtactgttccgctttccagaaggtgtagagtgtccttgtcgtaaagttcataggcatattttgcaccatcttctgttatgcgaagatgcttgctcccaccatcaaccgcataccaacgctcattagcgtcgagttcctttaaggaagtgtgacttttctgaaatgcctcaacttccaacagcagctcattcgctctgtgcgcgtattcatcgctctgctcaagtgtttcggacaggaagccttttatctcatctgctcctgtcaacagatcttcgtagaaatgctggaggcaatcttcctgacttgcaaattcgctgagaaaggcaaggccattcgcatcgagatacagctctgaaatgctttttgccaagtcagccgcagacatattgctgttctcttttaattggctttccgcttgctcggatttctccacagaaatgccgcgctccctgcaaatctccgcaaaatgccggtcaatgtccgtaatcagctcggaagccgtcttgttgatggtttccagactggcgcgaagctctttcagctccttgccctttgaccatgtggcgatatagccgaagctgttttctcccgtttcaatgccgtaatactggcagaccgcataggagatgctttcggcctcgacctcctcggtgttgcgactcttttctccggggacaaggatcgtttcaccatcgtccgcaagctctgtcatgtgttcatagtcgtggagcttggcgtgagcaatctcatggacggcggcgcataccgtctgcacctcactcataccggcgcggatggtgatgctctgcgccttaatgctgaaaaagccatctgtgtcatgcgcaacgggctttatctctatcggaacgggagaagcgcggcgcagcgcctccatgaaaacctcatactgctgcacattgccgctcagatcagcggcaagctggggcaagggctttcccgcagtctgtgacacatcaaagacggataccaccttgaacatagggattcggatttccttttcctcaatgatggccttgccatccgcatccagcaccggcgcattggtttccgggtcggtcttgatttcctcgacctttttcttatagggagtaggagcgatgatgcggatacctttttcgcctttcaggacgttcctgccgaactgatcgcgccacttgttgaagcccgccacatgggtggcgtcggggcgctgcatatagatgagcatggtgttgttgaccgagtagcggtgaaagcggctcatggtggcaaggtacttccggtacttatcgctctcgaacagctccttgatgccgttttcgatgctgtcaacgatttcccgcatccggtctttgttggtttgcttttcagccatgatgatctcctttcaaaaaatagcgcccctgcgcagaagaaaacacatcctgcacaggggcaattctccgcagatagatgttgttttcgggcttgcggatagaatgtctcagccccttgggattccgcatggaaaaagccttgcagcatggggctttttcggcctctatttgcggaggttccagtattgttcacgcttccgtttggcgtcctgctttcggcgctcctgcttggcgcagaccgggcaatacttggcgcggttggaggaagaatagaccggcttaccgcagacggcgcagcgctttcccggcctttcccgcatcacgtcggccagcagctcatggtcggcgggaagcaccgcgtttcggaaccagttgcacagcagcgagtaggaaataccctgtacgcagacgcaaggctctccatcatccagcgcgaggcagttgccgtgatcataattacagcagagcttccgaatgagctttttggagcggcggagctgcttgtgatccatacgcggcgcatcagccattgtcgaacaccatcttatagcccgtgcgctgtccatcgtcctccagaagaacgctggcatcataggttttcccggtcttttcggagtagcagcctttcagcggggcgcggccatttttcaaaagcgcagcggcaagggattttgtcagcacctttttcttggcggtgaaaaagcggctgtttttccagagaacaaaggaacaggcacggttctcacagaaaaagcctttcggtgattccgtcacctcggctccgcagcggggacacttgccgactacctcacgcccggaggggaacaggacttccgtaccggggatgggtttgtaggtctgcaccagctcatgtagcatggcagcgatcccatccatgaagctgtccggggcgatttcgccgcgctcaatctctttcaggcggtgttcccattcagcggtgagctgcggagactggagctgttcgggcagaacggtgataagcgccgtgccggtagaggtgggcagcagatttgtgatcttcttggacttcctgcgctccacaaaaccggaggacaccagcttttcaatgataccggaacgggtcgccggggtgccaatgcccttgcgctcggcatcatctggcatatcctccttgctcgcgttttccatcgcggccagcagcgtatcctcggtgaaatgcttgggcggcgtggtttttccggtcttgaccgatgcggcagatacggaaagcgtctgattctccgttaccaccggcagcgcgggcgctgcctctgcctgctcctgctcatagcgcttccagccgggagcaaggacggttttgcccttggcggtgaagctctgaccggcacagtccaccgtagtgaccgtttctgcgtagcgatgtggttcatccaccgcacgaagcaagccccttgccgccagcttcagcacctcgcgttcgcccagcggcagagaggccatatctaccttttccgcgctgatggtgggaacaatggcgtggtgatcggtgacttttttactgctgcatacctgcttggcgcagatggtcggcggcttcttcgtgccgcagacagcggcagcggcggcgacaagtccggggacgctgccctccatatcgtcggtcaggaagcggctgtcggtgcgcgggtaggtgcagaacttcttttcatagagcgcttggagatagtcgagggtctgctgggaggtgtagccgagaacacggttggcgtcgcgctggagggaggtcaggtcatagagcgcgggggctttctcggacttttccttgcgttctacgcttttgaccgttgccgtcttgcccttgcaggtattggcgatggcgtcggcatcctttctgtccttcattcggtctgtcgtggcgggaaagccgcaatcgagctgaacggtgtagaacggttctgccgcaaatgcggagatctccgcctcgcgctgtaccagcagcgccagcgtgggcgacatgacgcgcccaatgttcaatgtgcggccatacgtcagggagaaataccgcgtggcgttgataccaaccagccaatcggccttggcgcggcagagggcggattgatgcaggccgtcatagtcgcgcccagacttaagctgctggaagccgctgcggatggcatcatcctccattgaagaaatccaaagccgcagaatcggcttggagcatcccgcaaggcagtaaaccgtgcggaagatcagctcaccctcgcgcccagcgtcgcaggcgttgaccacctctgccacatcctcccggcgcatcagctcccgcagaatgtcaaactgcttctgcttttcagagcggacgatgaagcggaacgaggtaggaatgatgggcagcgccgccagcgtccatttggcatcatcggcattgtaaacggcggcgtcggccagttctgccagatgcccaaagcaccacgacacgatataaccgctgccctccagatacccgtcatgccgggattttgcacccagcacggcggcgatgctctgcgccacggagggtttttcggcgatcacaaggcgcatggtgcagcctccattctctttacgtcacggtagcaggggcgaacgcagctctgtccgaagcgcttgcagccgtagcagaagtgttccttggcagcgtcgggagggctgtcctcccgcactgctttcggcttctgcatcatcaggcgttccagcggattattggtgaaatatctcatacgttcgtatcctccgtagtatcctgttccggttcgtcctcatacggctcaaactcgtattcgtcctcgccgtaatcataatcgtccagatcggcgctgcccttggtctgcggcttggcctttttctgcttgaagatgtagaacgctgcaccgccgcccagcgagacgatcagcaggacgacgaggatgccgcccatgccgctctttttctccggttcctcggcggcgggttctgtcggctcagtggggacttctggctttgcctccttgcccacgcactcggtcatgttgaccgcgcagacggggcaggatgtattgaccgcaccggccacgcatttggtggtgcaggagcaagtggcgggcgtttcttcctcgccggtcagcgccatcaggtcagcctcatccacctgattcaagaagtggacggtttcttcgccctcatcgtcacggtcaataatcaggtaaaatgtattgccgttcttgctttccagcgtaatgaactgttttcctgccttggtgctggtgccaatatcgtcgatcagcgtcaaattgccgtccggtgtcagcgcgtcgctgccgcccgtcatgccgccgatgctcacggtgctgtcggcagcgtcggtgacggtcagatagctgccgtagacgtagcccacacgggcgggcagcaggattttcacccaatcgccgtccctgccgatcacatcgaccaccgtgccgttgggaagttgcgtaaatgcggtgttgtccagtcccgcgccggtgcggacattcaggttgccgccgttggtcgtgaccgtgccgatctgtttcgcttcctgtgcgtctgcggcgctgctttcggcggcaggcggcgcatcatcaggataatcaccgccgctggcaaaggcggaaacggggagaatcccgatgcacaggagcatcagcagcagactgataaaaatgcgtggtgtgttcttagtcatggttcaacgcctccttttccgaagtggccggtgcaggcgcggcctgcatacggcggaacagctcggcaaactgctccatcgtcatgccgttctcacgcaccatgccgatgatgtcggtgtcctccagctcacgaatctgcttttccagctcgcggttgcggccttgcagatcagagattttgcctttgttcttctccagctctccacggagcttcataattttcgggttcatatcgttcactctcctttacggcaagcgcccatagcggtagaaatgggactgccaatagcttgaatttaggtttgcataagagatcggatctccgcagtggatcatcatattgttgccgacatagatacccacatggctgacgccgggggtatcataggttccggtgaaaaacaccagatcgcccggcttgacgttggcagaggatacgggcgtacagatattgcaaagtccctgcgcgcccagcctgcccacatcccaaccggaatgattgatgacccaactgacgaagcccgaacagtcaaacgaggtggaggggctgctgccgccccaaacataggggtagccgagatacttttccgcttccttgatgatggcggcaaacacctcatcgtccagcgcctccgggggaatgtcgtagtcggtatagctgccctccacatacttgccgatgtagcctgaaccgggaaacaggtcggggcggttgccgagggtggccatataggtggcgtacattccgaactgttcctcgctcataatgtagacgggaacatgagagaggttgaagttttccagcgtgaccgtgcagatgtagtagtcatacggcacctgataggtgtccgtgtgggtgttgccgtccgcgtccgtccatgtgtcggtttctgtgcggtagcgggtttccaccaccacatcctcggtcaaaatatactggcggtcaaagagcatttggagcgtaccatgcacctcatccagtgtccattccccttgatgcagcgccgtgataatggaaatgagtacataggggtcatgctcaatggtgtccagatcaaagtggtactcatcgtagtcatgggtgctttcgtaggtgtcgaggtagcgctgaagctctgcttccatcgcgcaatactgcgcttccgcgcccagcatatcggcatcctgcgatggataggtgctggccgcgatcccggagccgacgccatccatcagcaccgagcaggaggacagaccgttgagcagaaacgccagcatcagcagaatcgcggcggcaatggcaaagccgcgccggtgctcccacacatatttgccagctttctcagccttttcagcggcttttttcgcggccttggcggtattctctgccgcctttgccgtagtctgcgccgcctgattgtgcttggcagcggcatactgcttcttaatggcctgcttctgctgccatttggaaacgggattgctggtggggcggtcgatctctgctttcttctggagcgcgtcaatgttggctcgctccagttttttctccgcacggatggcggcgcgataaggcttgagctgatgggcgcggtgggcagactgtaccagccgcccgccgctctccacggtttgctcaaccttgtgcgcagcctctacgcccacattgtcatcctcgctctgcgccacctcccggtgaacctgagagagaacaaagttggcaggggcatcccgcacggcatgggtcagcttggagggcggctttttcttgtccacttcctcaaaccggagctgcgtttttaccttgccggtggcaggatcaaagccgcgttcctttttgaccacggttttcttgggaattttggcctgcgccttatccgccttggccgctgcttttttcacctgcttgatgggcttttccagcttcggctcggcaagatcggcgtcggaaaactgtaaacgcggttctcttttcatgccgacgccacctcttgcggtttggtggtcatgacgcggtacagctcggtgtccttcgggaagtggtcaatgaagggcaggatcgtgttgccgtagaacagcagcccctcgccctcgccggagtgggtcacataagaaagctgatgcggcgaaatgttgagctgctttgcgagaatctgccggtcgccagcggcctgattgagcatatagatgaaatcgctgttctcaaagatgttctcaacctcccggctggacaacaggtctttgacattttgcgtgatcccggtggggatgccgccccatttgcgatagcgcttccagatttcgacactgtacgaagccgtctgttcctctttcaagagaagatggaactcgtcaagatagtagcgggtcgttttgtgggcagcgcggttgatggtcacacggttccagacctgatcctgcaccaccagcatcccgattttcttgagctgcttgcccagctccttgatgtcgtagcagacgatgcggctattcacatccacattcgtgtgatggttgaacacattcagagaaccggtgacgtagatttccaaagcagtggcgatgtactgcgcttccttttcatcctgcgcacggagggcgttatacaagtcctccagcaacggcatattctccggcttcggggcgttgaggtaatcccggtagacgatgcgcacacagcggtcgatgatggtcttttccacaggggcaagcccgtccttgccgccgacgatcagctcgcacagagacaaaatgaagtcggatttcaggctcagcgggttatcatcgtcgctgtaatccagattcaagtccatgggattgatatagcagggcgaaccgtcgtagcccttgccggtgggcgacagcttgatgacctgaccgtgcagacgctccaccagcggcgtatattcgccctccgggtcacagatgatgatgtcatccttggggcagataagaaacgcattggtgatctcacgttttgccgaaaatgacttgccgctgccgggagtgcctaaaatcaggccgttgggatttttcaacagtttccggtctaccatgataaggttgttggacagggcgttgatgccgtaatacagcgcctcggagccagtctgaaacaattcctgtgtggtgaaaggcacaaaaatcgccacgctggaggtggtcaagccccgctgaatctcgatctgattcagccccagcggaagactgctcatcagtccttcctcctgctggaagtccagccgggtcagcgcgcagttatacttctgcgcaatgctggaggtctggaagacgttgttgtcaagctgccgtggcgtgtccgccgtgttgagaatgagaaaggtcagcaggaacattcgctcgttgcgggactgcaaatcctgcaacagcttcttagcctctgcgccgtaggtggcaaggtcggacgggataatgtccatgtcgtacccggcgcggacggcttttttctgttcttcgattttggatttgtccagatcggtgatcttgcgcttgacggtcttgatggcgttgacctgatccacagactgcacatggagattgacaaggacgctgctctccatatccagaaagtccgccagcatccggtcattcagctccggtgcgagaatctgcacgaagctgatcgcgcccagctttttgcccatgcggaacatcctgccggtcttgaactcaaaggagctgggcgcgataaaatccttggtggacagcccggaggaagccagccagtcccacgaaaagcggaacggctcctgctcatccatccgcagaatgtcgtgcatgacgtgcaggcgctcaaagccgttcagcggcgcagctacaacgcccagccgcttgaagttgttcaggaggtcggtttcgatgcgctccaaacggggcttggcggcgcggaggttgtcggcctcaatgccgaatgtgagatacttggtcttaatgaggccgttgttgccgcgggcaagctgattttgcagcataccggcgtactcggcgcggatgccgtcaaactcgtccccgcagggcggaatggaaatgctccgcgcaaaggtttcctgcgaagccgagaggttcacaaaggaaagctggaattgcacggagctgtcaaagtagttcaggaaatcgcaccacgcctcaaagatggcggtcttgtcctcattctgcgagagctggtagttgatgtcctgatactggatcgttttggtgtagcgcgtgtcggtcacacggcagatgccgtctggccacatacgctgatacgggatgctatcctgcgccgatttttctttcttatccgttcggttcgctcttgcgatggcggcttcgatctgttttcgttcggcgcgggtcagctttttcttttcggacaatttgatacacctcccggtctaactggttttgccgctccagaacggcataaaaattgttggtcttatacgggcgctgcttcggccgctggaagcacacacggtagatgttgcggatgacgacctccagcggctgaccgttcttttcatacatggcgaacagcatggccgggatcatcaccaccatcatcaccattgcggcggggctggtgccaatgctgcccttgagcaagaagaaaagcggtacgccgatgagcgagccgcttccgaagcaaatgagctgccgtttcgtgagattgaacagcaccttggtctttactttggttaagtcctttgggacattgacataggccatagaaatcccccctttacaagagcttttcatatcgaagtttcatctgcgccgggtacaaagcggaggctggcttgcggctgcctgtccagcatttcccaccagctaatcctgcacagctccagccaacagcacggaggctgctgccgctctcgctatccagcgtataggtgatgatcttgcggtaccccattgcctttgccgcccgcgcggatgcggcataaaggatgctgcaagcgttcttctcaccggtggtgcaaaggcgattgacctccaatgtccagccatcatccagataccggctcaccggacggcctacgattgcaacgccgacaagctctccatccttggcatagccgatggaaaacttatgccccgcagttgccttatggtgccggtgatgcgcattgacaaatgcgttcgctgttgcaagggtaacgggcgtgagcgtcagcatggtatcacccccgttaatgcgcattgaacacggacttggcaaggctgctcgttttgaacaggcagaagcacagcagcaccgtgtagcccatgcaagtccagatggcgtagatgatgtcatccacaagcgcgatgttctgcaccaaaaccgcgtagatggcaacgcagacgatgatgagaaatgcttggaagcccagcgccagcagggaacggatgtaattctgtcccatgccgccccattccttgcccatcatggtcgccattgggatgggggcaacagaggtgacgagatatatttcaatcattcttccgaatgtgataatgaaaatgcagatggtcagcgcccacatggtaatgccaacgaacagcgactggaaccacaggccgaacagcggccccaactccatttccatcagccgatcctcgatacccaccatgacgcttgaaatgttgatgctggtgtcgccgataatcagcccggaggcgctggcaacgacgctttgggcggcatcaaacacgcccatcacaatcgtccatgtgtttgtcacgatcaggacagcggcagcggacttgaatgcccacttgaaaaatatccatgtgtccatgtcgttgaggttatttttgtcggtaatgagctggatcagttccagcgtcatgacaaaggcgagaattgcgcctgcgatggggacgatcacggtttccgacaggttttgtatcatgctgaaaatgctgccgttccatgcctgcggcgataagcccacctgaccggagatctcggcaaccttttgattggtcgcatcgaacatcccggacagattgctcacgataccgccgatgagcatttctttcagccattccgtgatcttatcccataagaaatccatagggttgccctcctttcaggaggatgccgcccgaaagcggcaccctccgtggatttacgggaagcaaacgagctgccgattagccgaacagaccggacagcagcggcacgagggtaatgccaatcaaagccaccccgccaccggccatcagctgcttcatgccctgagatttagcaccagatagccataggtaagcatttgatatgatctccagcttttccccggctccacaccgtgcgtgcagctttcaccgcacacggcgttccatcgaatttggtcatacagggcttgcgacactttgtgtgtacttcttttgccaaattcgacttgtggcctttcctccaccgtttactttttcacggcttcataggtactacgccactactttcactgaaacaaagaatggttattgccttctcacgaaggtattcccatccaccatctcgcagccttgcaacaggctaaatgttttcagattcctgcgttccgatatttctatcatgggccgcatttaggttcttcctctaagcctgtattcaattctttgcgaatcgtgccgcctgtaacggcacatggactttcataacaaccatttttacttgtccacgaatacctccgtataaggagtaccaccgtttcgatggtatcaacgtttagacttgtacattcagaagttcgtcagtatttccatacatactaaccatgtgcggctgacacccggcatataggatgcgctatccacctctggacagctttcgatttcagccttgcagccaaaactacggcatctctctgccgacttcaccgagcttctgacaatcggcggttgcgcacctatgccagtcggagtattagtgtggacgcttcggggcgttacccccctcatttcatccatcgaaatatcagttctccaaggttttggacttcattcgtccttcgacctgtgcctgaccttttcagtcaggaacgcatcgcacggttgtcgttgccgtagccctccagcagattgatcgcaccccaaatgccgaggccagcgcccagcgccacaacgagggtctgaagaacaccaacagcagaattaaagaaagccataaatagtacctccgaaaaatatgtttttagattttggagggtacatttcttccacgaagtttcatcgagtcgttgtcaaagcaggctgccgccgtcaggcgacaggttcaccggaaaggtctgcctgatacacctcaactgcatcatccggcttgagcttgaggcgatgggacagaaaacgctctatgtcaaaggcgtatttcttgtcataatccgctgtacagcggtagagggggtgcttggtgagatcatatttattggacagaaacgggcggacgccgcgaagctgcaagatgcacttgccgccatccagcacggcaagctcatccacgctcatcagctccttgcccaatttctgatagttcagcgaatgggaaacctcgcggccacggctctcgccggtgttatagctgtcgatggtttccttgcccagcgccgccgccagctctttcagcgtaccgggttcctttccacccaaaaagatggaacagtccatgttgccgatgatcgtatccgcgctgtctttatacagggctttgagctggctctgtgcctgtaagacaaggcagcaggagatttctctggaacggattgtcgctaccagcttctcaagcctcggtatctgcccgatattcgcggcctcgtcgatcaggcagcggacatgaaccggcaagcgtccgccgtacacatcgtcggccttttcacacaacaggttgaatagctgggtatagcacatggaaatgagaaagttaaaggtatcgtccgtatcagacatgatgatgaacagggcggttttccggtcgcccagcgtgtccagttgcagctcgtcataggccgtcagttcccgaagctcctgaatgtcaaagggtgcaagccgtgcgccgcaggaaataagtatgcttttcgcggtcttgccggcacttagcttgaatttggcatattggcggacggcgaagtggtctggcttgcgctttttcagctcgtcgaacatcaagtccaccggatttttgaagtcctcatcgtcctcacgcacctccatcgcattgataaattcaatgagcgtggagaagttctgttcctccaccggcgcttcatagtggatgtacccaatgagggcggtgtagagcagcgtttccgctttcacccagaaatcgtcaccggctttgccctcgcccttggtgttggcgatcagcgtcgtgaccagcttcaaaatgtccttttccgagtggatgtaggcgaacgggttgtagtgcatggacttcttgaagttcagggaattgagaatcatgatctgatacccgttcttttgcagcgcatggccgcaggaaaccacgatgtcccctttgggatcggtgacgacaaagctggtgggataggtttttgaggtgcattgcagcagattgggcttcaaccaaaagcgggtcttgcccgaaccgctgccgccgacgatcaggacatttttattccgcgccgttttcgggtctttggggcggctattcatcgtcagccgctccgtctgcgtgagaatgatgttgttctcaaatgcgggattgacgtagggcttgatgtcctcggcggttccccaacgggcgctgccgtactccagatttttgcgaaatttctttgcgtttttgcccttgatatagaccgccagccgaatggcaatggcggcggcaacgcccacgcacaggtcaatggggtgaaagctggggacaagggagtggaacgccgtgttcaggccggtcataatgttcagcagcttcgtggaagcgtccgaaccgggagccagccgcaccgcctcgctgaccttggtggccagcaacgcgatgaacacatacggaatgttgggaagaatgagctttttgacgtttatttgcttcatcgttccagctccttccgctttgtcctgtccaccacagccgcctgaatgagcgacttgaagtgttgcagcttttccagcaccgaagggcgctccgcctttctgacctgcttggcggtatattccttgaacgcggcggtcatagcgtcggcgtccggtgctttgaagaacaccatgtaccgcttttcgcccttgaccttgaatggagcgaagtcaatgccatacttccgggcgatccggttgaatgagccgatattctgatcggtgacttcaatgctctgcaatcccttatccttggcggcaagctgcttgacggtcattttcccgtgggggttggccttgccgtgctgatatttctgatggtcgttttttagctgctccagcagcttggcaacggccttgcgaaattcctgttcacccagctttccgcaggagatcatcagggatacgattctctgttcaacttcttcctgcatgacttatcacgctcctttccttcgatttgcagggagaacgccgggacactaaggcggaaccaccagccggtgcagaagatgcttattcatttctgcgcccctgtcccttgacggtcaggatgccgtccagcgtggtggcggtgatccgcaggcgctcggccacggcgatgtcgtttttcacgctttcatccacggtgctgccgcaaaccaccagcacacgagcgcggcgcagatattcccgtgccatgtcgatgccgtccttatgctcctgcggaatctcatcgcgcaggaacagcggcagaaacagcgcggggcagacgggcgaaaagcccgcatcatagaccgccctgcaatacttggcggcgttttcggtgttctcaaactcattttcgctccacggagcggtgatgtaggcaaggggacgtttcatcggtatcaaatcctttctcccggaatcgggcatgaaaaagcggcctttaggggccgccgtgaaaatcgtgattgaccagcatggcatagtggttgtcgatggtggaaacggaattgaacagcgccgccatgagataggctttcgtattccagacgcgggtggtgttctcgcggataccgtccataaccttttcgatgtgcatggaggtgatcttttcaaagcgctgttggacgaagccggtgggatactccgcatcccgcccgatcttgaccgtggggctgcggttcatagcgacctccagcatgatctccgccagctcatcgagctgcatccggtcatactgctgacagagaatgtcgtattcgatttgctctctgatctctgcttttttctcaagcccgtccgtcattccgtccgccgcaggcagaaagaatgaatgagtgcttgatagatcagtatttgatttttgagtattagatttcttagtatttaattgcgcgggattatccgtatccggttcctccgcatctgggttatccagatacgggttttccgtatctggtgatgccgtacccggtggagagggctttcggggcttctcaaagatggtgtattccgtgtcggaaatgcgcccgtccttgccgcgaagctgacggcggatgatgtagcctgccagctccagctccttgagcgttttcccgatggcgtccacgccctccttgcagatcgcagcaagcccccgcgtggtgtagttccactcgtcggggagggagagcatcatggagagcagccccttggctttcagggaaagattgctgtctttcaggtgatggttgcacatcaccgtgtaatcccgcgtccgttcaacgcgaaatacagccatattgcttcaatcctttccgcagggcagtcaacctgtttggccgtcttccttggcaaaccgcgtatccagccgctccacgctccagttctgcttgaactgtcccagcgggccggtgccgaactgcgccagcgcacggcgatccagctccagcagcttttcccacagctccgggtggtgttttcgcagcttccgcagctcgtcgatgcgttggaacgggcagcaccagcaggacgcacggtggtagatctcatacagcccgccgaagtcaaagccccggtcatagcaggcttgaagcgcctgcgcctccgtaatgccccactctacaaggggataccgctcgtccttgcagcgccgcgcttcatcggcggcgatgccgacgtagtggatcgcgcccagctcgcctttgagccggttgacctccttggtgatgaggtgcgttttgagctgtccggtacaccagcggacgcggatacccggccagccgttgccgtagggcgggatgcccagtcttgcacggttttccagactgcggggcttctgcttgggttcgtcgaacatcaggtattcaaagctcttgggatgccgcagcgtggtgatatggatgccgcgctcccggaaaagatgctcgtccagtttggcaaggtgttcgtacatttccgggaactccatgccggtgtccgctgacagcaccatgttgatgggcatatcccgttcgatcatcaaaagcagcatggcggtactgtccttgccaccggacaggctgacggcgtgaaactgcttgccgtttgcgttctgaatggtttcccgcatggggaagccgctccgtcctcactccttccccacatcacagctcatagatgggctgctcgtgttcgtagtagggatcgcacagggcggcaagctcggccaccaagtcctccaaatccagagaaatctcgctgtctgcccaatcgctgcccttgtagacgcgatactcggtgacgtattcgccttctccggcgttcacgctgaatttggcaacgacggcaaagcccatatcctccagcagccacagctccatcgagtgggcagcaaacaccgcgccgatatagctgtcgcccacgtcctcatagagaagcgtcgctcgctgcttgaacagctccgtgctgcgatagtccaagctcagcgcatttttgccgtctgcgcgataggcatagaccgtttcggccttgttccaaacagcttgcagcagggcgtgatagtcaatgttttccagaaactcgtcgatctccgtttccgtgtagccgacctccgtacccttgcggaacagcgtggtcagcgctttttccagctctgttactctgctcatggtaattcctccaatcattttagtgacgccgctttttccggtcaggaaggatatgcccctcaatgacggcggcgtgtttgcggattttgatttctccgcgtttctcggatgcctgcgccttggcatatcccacgtcggataggaacagccgcagccgttcgcccttttcacccacgggggatttccacgacaggacatcaaaaataatcatgtggcgggtttcgtccataaagcgctccagcgcaaggatgctgtgaccgccgacaaaatcatcagcgttcatattcggcacctcgcgctctgatctgaaaggcggcaagcccataacgggcgatcagagtggcgttgacgatcaggcgcagcgcctccgggtcgatcacctccggttccgctaagtccgccatcgtgacagcctctgtcttatcgcagaggtcacgcgccgccatgaacagcgcgtaattgtgcggcgaggtatttttcagcaccgcataaccgaactcaatcccgtgcttacagaagcaatttgccgtgcggcggtaaatgtcgtcgttagaggtcagcaggtacatggccgcatagtaggcgttggtatccctgcggcggcggtagccctgtaccgtgcgctggtactgcatcctgcgctcatgctgctcgttgctccacaggcttccgggatagtgcttgataagcaggttcaggcgctggaacaggcggcgttcatgggggaatgtctctaagaccgcttcacggtagccgaccacaccggcctcgatgcgctcggccagccacgggcagcgcagggcggtgcatcccagctttttcacatactcggtgcaaagctggcagctcacatccttgggggtatatttgaacgtgttgatatacatgggtgcctccttccgggcatgaaaatagcggacaaacaaactgcttgtccgctcaacggctctgatcgcgctggcgctttttctgccatgcgtccagtaatttgaagatggtgttctcaatctggaacggggtataggaacgcgggaagtatttgcggagcttttcaccggagagcgtgatgtcgtttttctccggtttcttctgttccatcataatcgaaagcatggtgtcctcgttcagctcgccgctctgactgagctttttcatccgctgcgcctgagagagcgagggggtggcctgttcgctgtcgatggtttccagaagcaagccctgctccttgggcgtcagcgccgcaatctggtaggcaggactgagggcgattttcttctcatccaccatctgctgaagctccgggactaactgcgtcagggcaatgtagttgcgaatggtgtcaccgctcacaccggcttcctgcccaacttcatcatcgctgcggaacttcgccgaaattttcggcgaagtcagatccgtccgtgcgccctgccgcttgatggcctccatcttcatcttgtaggctttggcgcgttcggagggaagaatgttttctcgctggagattgctgtccaccatgatgatggtggcagcgtcccggtcgatgttgcggacaatgacgggcattgtggtcagtcccgccagctcacaggcgtgtttacggcggtggcctgcgatcagctcatagccgccgtcctcccgtggccgcgccagcgcggggacgaggacgccgtactccttgacgctttcggcggtttcctgcatggacgcatcctcccgcacctgaaagggatgatccgggaacggatgcagttcggagagcggaatctgaacgactacttcctgctgcggtttcggctttttggatggcacgggctttttgtccggttccttctgcactgttttttcaggcattgtgttcctcctgtcggcatctgattttgggtacaaaaaaaggacatttcttcttttcagaggaaatgtcctgatttcttggacgggctgacagcctgcccaaacggtattttatttttgtcgttactataacaccccctacgatataactacttcgcggctcgatttttcggtttggaaaaggatgaaaaaccttgccagataaccgaaaacccttgatatacggggctttttctgtttgtcgttattataccgtaacggcacagctgcgccagtttgctgctggccaatggcgtccccctcaagcacattcaggagtggctgggacatagcgactttaccaccacggcgaatatctacgcccacttggattacaaatccaagatcacctcggcacaggcgatggagacagggcttgctctgccagagggcggcgacttcagcagccgctgggggtcgatcggtgccggggagaacttctgattttctcccctgaaaaccgaagatcgtgcaggcttatcctttgggcaaaaataaaaaagcctgtaatcggcgtgattacaggctttttgtggcggagagttagggattcgaaccctagagacctttcggtctacagcatttcgagtgctgcaccttcgaccactcggacaactctccgtgtctattttcgtccggttttctttccagaaatttgctcaaaaattcgttggagagaaaacaggagagacggcaaaaaatattcgattttgagattttctgtgttgaggaatatcaaggagaatcagggggacgaaaatcacaggtcctgtcgaaatttcgagtcagtcccgttatgaccgcttcgatacgtttctatattcggctaaagcatggaaaaacacgctttgcgcatactattttatcggttttgagagaaaaagtcaagcgttttttggcaaaaaggttgacatatacagggcaatgcggttacaataactgtgtattatgatgcttagaccttttgttttcgcacggctaaagctgtgcggatatgacccggaaagtgaggatgccgcttttgcggcgaatgcttatggatatgaaaaaatggatgcgctgcgctgcggcggtcgttttgagcgttttggtggcgttcagcgcgacggcgtgctcgcagccggcgaatattgaatcaggcgccgtttcgcaggaatacccggtgaccgtgaacgaagtgacgttaaacgcaaaaccccagaaggtggcggtactctccggcagtttagcggatgtggtgctggcgatggggtacgagacgagcttatcgcttgcaagcgacgactgcacacagcccgatttacaagttctgccgaaggtttccgcaacggatgcgcagagtgtgatctctgcaggtgtggatctcgttttggcggagacgatggacgacagcgaaaagcagacgcttgaaaacgcgggcattacggtgctccttttgacgcgtgcgaaaaaccgcgaggattttgaacgcctgtacgcgcaggtgggcacggctttgaacggcggctctacgggctataatgtaggcgtgaaggcagcgcagaagatcttctcctcgctcgacgacctttcgcgcttggcaccggaaagcaacaccgtggtgacggcgtgctatatttcggatgtaaacggctctgcggtgacgggcgatgagcttggcagcgtgatgatgtcgtatatcggtctgacgaacatttttaagggccttacgggcggcacgtttacgtttgacgatttgcgattgagcgacccgacgatgattttctgctcagaagatgtgcgcgggcagatcatgcaggacgcgcagtacgcgaatctttcggcggtaaaaaacggccgtgtttacgccgtcgacccgaattatatgaattggcagggcaagacggtgtacaacgcgtgcatcgacatgatgggccttgcataccccgaattgacggaggaaaactccgctgcgctggagctggattccgagctttcggaaacggaagcgacggcgagcccctcgcccgcgccggaatacacggcgatcaaatccggcacggagggcgacgatgtgttcgcgatgcagcagcgcttagcggagcttggctatctgacggtggaatacaccggcatgtatggagaagtgacgatggaggccgtaaaggcgttccagaaagcgaacgggcttacggcgaccggcgaagcagatgccgagacgctgacggtgctctattccgcggaggcaaaagccgcagacggtgcggaagccacggcgacgccggagccggaatcggaaacgagcacggcggagggcaccgtgacaacacacgaagatgcgtaaaatttgagagcttgaaagggcggctttgccgcccttttttgtattgactttttcttcgcttttttttataattagaagcaagatgcgcttttgtgcgctattgtattgagtttggggcgcaggctccgggggaggaaacatgtttttcacaagagacaagagcttttacaaaacgctcgtcacgctcgcgataccgattgcgctgcagaacgccgtaacctttgcggtcggccttgcagataacgtgatgatcggcacgctcggcgacagtgcgatttccggtgtgtatgtgggcagccagctgcagacgctgctgcaaatgttcatcggcggcattgagggtgctatcctcattttagctgcgcagtattggggtaaacgcgatacaaaaagcatccgccgcattgcggccatcggtgtgcggtttgctttgctcatcggtttggtcattacggtgacggcgtttttattgccgtcgcagatcgtatccctgttcacgagtgatgcttcggtcattgaatcgggcacggtttacgtgcgcgtggtgagcctttcgtacattttcttctgcatttcgcaggtgatggtggcgacgatgcgcgcggtggagacggcgaagatcggtctttacgtgtcatttgtgacgctcattgtgaacgtcatctgcaactatattttgattttcggtaagcttggcttcccggcactcggtgtgaccggtgcggcagtggctacgctgttttcgcgcatcattgaagcggttgtgatggtcgtttacgtgcgctgcatcgataaaaaactgaagcttcgctttgccgacctcttaaagcgcggcggcgaattgacgcgcgatttcctgcgctacggtctgcccatcatgggagggcaggtcgtatggtcggtgaacatgctggggcagacgatgattctcggccgttatgacgcgggcgtcattgcggcggtgagtatcgcgaatatgttgcacaatatgatgtacattgcaatgaacggcctttcgagcgcggtgggcattatcaccggcaagacggtcggctccggacgtatggaaaaaattcgcgagtattcccgcacaacgcaggtcgttttccttggcctcggcattctttccggcattgcggtgcacttcctgcgcgacccgttcatcgggctgtacggcgcgagcgatgcggccgtggcgtatgcgcgtgagttcatcaatgtcatttccgttacgattatcggcacgtgctatcaggcggcgtgcctgttcggccttgttaaatccggcggcgacatttcgtttgtcttccgcaacgacacgatcttcgtgttccttgtggtgctgccgtctgccattatcgcgtcttacctcggtgcgccgccttgggtggtttttgcgtgcctcaaatgcgaccagatcttaaaatgcttcgttgccgtggtgaagatcaaccggtataactggatgaagaatctgacgcgcgagacgaacgaagtgtaaaacgacgacttgaagggaattttcatgaagcaatttcgcggagccttgctcctgacgatcaccgcccttatttggggcacggcgtttgtagcgcagagcctcggcatggaccatttgggcccgtttgcgtttaacggcgtacgcaatttcattgccgcgctggcacttttgcccgtgctgctgtttatgcagcgcaaagcgccgaaaaaaacgcagacggacgaagagaggaagcagagccgcaagaccctgtgggtgggcggcgcgctgtgcggctcggcacttgccgtggcctctaatttgcagcagttcggcatcagctttacgacagtgggcaaggccggatttttgacggcgctttacatcgtgattgtgccgatactcggtttgttcctcaaaaaacgcgtgcccgcaacggtttgggtgagcgttgttattgcggcggcgggcacgtatttgttaagcgtgcaggaaggcttcaccatcgcgccgggcgacctgcttgtcattttgtgtgcgttgggcttttccgtacatatcctcatcatcgaccgcttctcaccgatggtgaacggcgtggcactttcgtgcgtgcagtttattgtctgcggcattctttgcacggcagcggcgctgtttacggagacgttcacgcttgcggacattttaaaaagtgcagggccgctgcttttcacgggcctgatgtcgagcggcgtggggtacacgctgcaaatcttggggcagaaggataccccgcctgcggtggcgtctcttatcatgagccttgaatctgtgtttgcggcgctttccggctggctggtcctcggccaaagcatgaacggacgcgagcttttgggctgcgttctggtgtttgcggcggtcattttggcgcagatcccgcttgagacgctgaaaaagaaaaaagcggtgaaaaagacggcataaagtaaattggggcatttccgggaaccgtttcgcggttttctgcgggaatgcctttacttttgcaaattttatggtatagttgtaggtagaaactctttgggtaaaaacgcgcacggcataaggctggcgctttactgtattgaaaggatgaatattcaaatgcgtattatcaaaacgaaaacctatgaagaaatgagcgccattgcagccggcatcatcggcggccaggtgcttttgaagccgaactgcgtgctgggtcttgcaacaggctcttcgccgatcggcacctacaaagatcttgtaaagagttatgaggacggcgtactggatttttccgaagtgcgcaccgtaaaccttgacgaatactgcggtctggacggtacgaacccgaacagctaccgctatttcatgaacgacaacctctttgaccacgtgaatatcgacaaggcgaacacacatgtgccgaacggccacgcagatgaccttgaagaagaggctgtgcgctatgagagctttattcagtctctcggcggcatcgatctgcagctgctcggcatcggccacaatggacatatcggctttaacgagccgacggataacttcccggcgacagtgcacaccgtacagctgacggagagcaccatcaacgcgaactcccgtttgttcgagcgccgcgaggatgtgccgacgcaggccatcaccatgggcatcggcaccattatgaaggcgaagaagattcttctcatcgcaggcccggataaggcggagatcgtcgaaaaggcttgcttcggcaaggttacgccggaggtgccggcttccgttttgcagctgcacccggacgttacggtcattcttagcgcgggaaagtaagttttttcggcaaaactaaaatttgatagttgactttaaggttaatttatgctatgatgtagacagtaaagctgcaggaagcggcaacggtcaaaagaccgcgcggcgaaacgccgtttgaaagtattttaagccacttaaaaaaatagaccacgaaggtcttttcgctcggtatgggcggaatgcttcgtggtctttttgtatctgggagggtatttcaatgaaccgtacaaacagcaaattttccgttaaaaatcttgtgctcggtgcactttttctggcgcttgcgttagtactgccgttcttcaccgggcatatcccgcagatcggcgcaatgctgtgtccgatgcacctgccgattttgcttgcaggcttcgtatgcggcggcccggtgggcgcggttgtgggctttatcgccccgctgctgcgcatggtgatgttcggcatgccgccgttctacgtcgccatcgctatggcgtttgagctgctgacatacggccttgtaagcggcatcatgtaccgcaaggtgttcaaaaagcagactgtcggcacgctgtacggcagccttttgatcgctatggtcgcgggcagaatcgtctggggtatcgtgaaggtgatcctcagcggcattgcggcagatgcgggcgcgttcacatttgcggcattcatttccggcgcactcttaaacgcaatcccgggcatcgtggtgcagcttattctggtcccggctgtcgtcgtcgccttgcagaaagcaaagctgatagaagcaccgagcgcggaaaaagcataagcactataggttccctgaaagggcggcattgccgcctttttttcatgcacaaagcttgcactcacctcgccatcgtgctatgataatcccaaagagacgaaaagcaggatgggggaaagactatgtttacggatgcgttcggcaaaatttggtataagggcaatctgcacacccatacaacgaactcggacggcgcgtatgcgccggaagaaacgattgcattatacaaatcaaaaggctatgatttccttgcgctgaccgaccactggttccacggtgaggggcggcaagaggaaaattttctcctcttaaacggcacggagttcgacgtgggcagtaccgtgcaggagggcatttaccacatcgttggtatcggcatggagaaagcgcctgcgcttacaaaacgcgcgccggggctttccgcgcagaagatcatcgatgaaatccataacgtgaacggcattgcaatcttggcgcaccccgcatggtcgctggatcgcgcttcggaggtcgtgaagctgtacggcattgacgggtgcgagatttacaacaccacttcgggcctgccgtggaactgccgtccgtattccggtgtgtttttcgacgaaatggcgcttttggggcactatttgccgtgcatggcggcggacgatgcgcatcactacacgggcgacgagacgcgttcgtacatcatggtgcaggcggatgaattgacgcgcgagggtgttttggcggctatccgtgcaaaccgcttctacgcaacgcaggggccgaatttccgcgttgaaattgaaaatggcacggtcacggtgcatacctcgccggtgcaggaggtcgtgttcttcaccgataccgtttgggcgggcgaccgcgcgacggtaggcgaaaatgtgaccgaagcgacgtataaagtgcagcctacggacacgttcgtgcgcgtggagctgaaagacaaagacggcaactgcggctggtcgggtatttatcccgtcaacaaaaagtaaaaggaaaaggtctgctcaccaaagcggagcagacctttttgcgtatgaatttaaagcgtgatttgcatgccgtcgttcacaaatttgacgggcagcggagcgagcgtttccgcaagctgcatgacgttcgggatattccacggcgcgtagtggttgacgagcacctgctttgtgggacaggcggccaaaacgggcgcgtaatcggtcgccgggaagtgtgcggcttcgcagatgataaattcggtcggcttttccttggcgatttttggaaaatcgacgttgggatgctttaagtcgcccgtgaacagcacggctttgccctcggcttccacgaaaaaagcatgggaatccgggcaatgctgcgtgggaatggcggtgacttttaaatatccgtcgtcgaagattgtgccgtccgtgatctttttaaagcgcaggtcgcgcatttcgcagtgattcgctttgagccatgcacggatggcctcaacgccctccaagttcggcaggcagatttcggggtcggcggttttaaaataccagctgataaggtcgacgaatgagatgagcccgtttgtatggtcgccgtgcatatgcgtgatgaagatgcccttgacgtcctccacctcgatgccgcgtgtgcgcagggcatcgatggcgttgacgcccatatcgatgaaataatatcggccgttcgtttcgatcaaggtgcaggagcagcggcgattcgcctccggcacgccgtggcttgcaccgagaaatgtgatctgcatagagtttaaattcctttcttttcaatacttttagtgctttctgagattttcaagaatttgcaccgcaaattctttggaagactccctaattgggcctcccacactttaacagtccgccggactgttaaagctcccatcctgatttttaggtaggcaaaagagtttcgaactctgcagagttcgaccaaaggcgttgcctttggatttcacgaccgaaccatgggttcggtttgaccttcatttgaaaaaaggtcgatcaaaaacttttgcatcgcttcgctgtgttcagtttaacacgtttatgtatcgactgcaatgtgccgaattcacagattttcgctttcgtttttgtctatcacagctttagggtttccagcagacggttcgtttctcgctctacatggtcgtagtcgacgaacgggcggtagatggtttcaatcgcgtcatgtgtgcgcttgcagagcctgagctcctccacggcctgcgcagtcaaggtctcggcctcctgcatggcgaacgggatgaagtccgaaagcgggctcaaaaggaactcgtttaatgtgctgcgggtatcgtccgcggcacacagcatggtgtcgccgatgcgcacgcactgcggtgcttccggcgtgagcggatgcaggaaaatttcagtctgcgtattctgcacgagcttcatggcttcatttaagaacaccgcgcccaaaacgccgggcaggtacacggtgttttcggcatcctgtgcttcccggaaatccgcaacgccggcgggcgtggggctcgttaaaaatagtatgcgcggtgtgccttccttcggcagtgtgaaaccctcttttaaaaatgtgcggatcatggtaaggtcggcagaccttgcggcttcgcttacggcagcacggcgcaggctgcctgcggcggaaaggcacgcgaacgcgtttttgtagtgcgcgcggttttcttctgcaaggacaaaaagctcttcgcggcggcgtttgaagacctctttgtgcaaaaaccgtccgagatccagcgtttcgccgtcaatccccggcatggcggggtctatggtgtgcggcgcggtgccgtccagtaagacgagccgccgctgtgggatacgcacggcgtcaaagctttcggggtcgcttgcgcagcgaaattcttcgacggtaaacccgtttgcccgtgcgatggcggcgcattttttcatcaatgtgctttttcctaccccggggccgccctttaaaacgtaggtgtagtgcggctcgctccacggcggcacgatgccctcaaaatgcccgatgaatccgcgcccggtgttggcgcccggaaaataccttcttttgccgtttgacataggaaaccctcctcatttctcatcggtgagttatatgcgaaaagccgttaaaatagtcgccccggacaagacaaaaagtggaaaacccgtgcggaaaatggctttcccacacaagaaaaaccgcgttatgtcacgaattttttacaatctcgccgcggtgctgcgtattgaattgcgcgcgcgcctgtggtatcattaaaagtatatttgggtaattttgcggatatgtaagagctgccgaaacaggcggcatttatgcggtatcggtatacgatgcggaaaggataccgcagaaaggatgaatcaacatgatgagaatcggtttggacgttggttccacgaccttaaagtgcgttgttctgaacgagcagaacgaggtgcttttcaaaaaatatgagcgtcatctttcgcgcatcgtggagaaatccgttgagatgctgcgtgaagtggcagagcagtttccgaaagaaaaggtgcttttgagcatttccggctcggccggtatgggtcttgcagagcgcagtgacattcagttcgtgcaggaggtgtacgcgacgcgcattgcggtgaaccgccttgtgccgggtacggatgcggtcatcgagcttggcggcgaggacgcgaaaattttgttccttacggacggcaataacgcctccggccttgaggtgcgtatgaacggatcctgcgcgggcggcaccggcgcgttcatcgaccagatggcgacgcttttgaacatcaccccggatgcgctcaacacactctcgaaagagcatgagaagatctacaccattgcttcccgttgcggcgtgttcgcaaagagcgatattcagccgcttttaaatcagggcgcgcagaaaaaagacgtggcggcaagcattctctacgccgttgtgaaccagaccgttgcgggtcttgcgcagggcagagaaatcgcgggcaaggtcgtatacctcggcggcccgatgacgtttttgagcgagctgcgcgtggcgtttgataagacgctcggcattacgggcatctgcccggaaaattcgctgtatttcgtcgcgttgggtgcggcgtttgcggcggacggcaatgagacgacgcttgcggagatcatcaaccgcattgcgcattacacggcaaaggaagaataccgcgcctgcccgccgctttttaaggacaaggcggattatgaagcattcacaaagcgccaccttaacgccggcgttaaggtgcgcgacacactggaggacggcgagccggtttatatcggcatcgatgcgggctccacgaccgttaaagccgttgtgacggataaggacggcaatattgtttgttcgcgctatatgtcgaacagcggcaaccctgtcccgctgatgcgcgaattcctgcttgaagtttacacgcgtttcccgcaggcgaagatctgcgcctgcgcggcgaccggctacggcgaagacatcatcaaaaacgcgttttccgtcgattacggcatcgtagagacgatggcgcacttctacgcggcgcgcgcgttcaacccgaaggtcgatttcatcatcgacatcggcggtcaggacatcaagtgtttcaaggtcgaaaacggcgtcatcgacgatattttcctcaacgaggcttgttcctctggctgcggctcgttcctccagacgtttgcgggtgcgctgggttactccattgaagattttgcaaagctcggtctgtttgcggatcgcccggtcgacctcggctcccgctgcacggtgtttatgaactcctccgtgaaacaggcgcagaaggacggcgcaacggtggagaacatctccgcgggtctttccatcagcgttgtcaagaacgcgctgtataaagttatccgtgcggtcgattccaaagcaatcggccgggagatcgtcgtgcagggcggtacgttcctgaacgacgccgtactgcgcgcgtttgagcaggagatcggccacgatgtcatccgtccgaccattgcgggcctgatgggcgcatacggtgccgcactgtatgcacgcgaaaaagcacaggctgcgggtaaggcgacggagctttcgacgcttttgagcaaggaagcgctcgaagaattcacccacagcgtaaaggctatcacctgccgcggctgctccaacagctgcaagttgacggtgaacaccttttccggcggacgcaagttcatcagcggcaaccgctgtgaaaagccggtgacgggcgtgaaatccaccgaagcacagtacaacatgtttgaagaaaagcgcaagctgctcgcgcgctatacatacaaagacacgggcaagccggtcatcggcattccgatgggcctcaacatgtacgagcttttgccgttctggtataagttcttcacaacgctcggctacgatgtgaaaacgtcaccggcgtcgaatcgccagctttatttaaaggggcagcacaccattccgtccgatacggcgtgcttcccggcaaagctgatgcacggccacgtggaaacgctgcttgacgagggcgtggacgcggtgttctacccctgcatgacgtataactttgacgaaaatctcggcgacaaccactataattgcccggtcgtcgcctattacccggaggtcatctcctccaatattcagaaactgaaagacaccgccttcatcggcgattatgtcggcttgcaccgcagacacgatttccccggcaagatgtacgagattttacgccgccatttcccgaacggtacgttcacgaaaaaagacgtgaagaaagcgtccgacgcggcgtatgcggagtatgacctctacatgcgcgccgtgcgtgccatcggcgacaaattcctcgcgctcgccgaagaacagcataagcctgttatcgtgctggccggtcgtccgtatcatgtggacccggagatcaaccacggcattgacagcctcatctgcgactgcggcgcggttgttgtgacggaagacgccgttgcgtgcaaggagaagaaattcccgacgaaggtcctcaaccagtggacgtatcactcccgtctgtacgcggctgcaaagtacgttgtagaccgtgcggataagcgcgtgaacctcattcagcttgtctcgtttggttgcggcgtggacgccatcacgaccgacgaggtgcgcggcattctgcacgacggcggcaaaatctacacccagctcaagatcgacgagatcacaaacctcggcgcggtgcgtattcgtctccgcagcctgtttgcggcgctggatttacagtaagggaggcgcacgaatatggcttttaccgatcgcgttgaatttacaaaggaaatgaaaaaagagggttatacgatccttgcaccgaacatggcgcccatccatttccgtttatttgaaaacctgttcgcttcttacggctacaacgtggagattctccagacgcgcggccgtcagattgtggatgagggtctgaaatatgtccacaacgatacctgctacccggcgctgctcaccatcggccagatgatggacgcgctgcacagcggcaaatatgatctgcataaaacggcgctcatcatcacccagacgggcggcggctgccgtgcttcgaactacattcaccttttgagaaaggcgctggaaaaagacggcctttcgtatattccggtcatttcgctcaatatgtccggactcgagaaaaacagcggcttcaagctgacgctgccgatgatccgcaaggcgctgggcgtgcttgcgtacggcgaccttttgatgctgctgcacaaccagacgagaccgtatgagaaagaggcgggcgcgagccggaagcttgtggacgattggacgaaaaagctgaccgatatgttcgcaaaggaaaagggctactccgcaaaggagatggagacgatcctgccgcagatcgcggaggattttgcgaacgtgcctgtgaccggcgaaaagaaagtgcgcgttggtgttgtcggcgaaatttacgtcaagtattcgcccatcggcaacaacgatctggaagagttcctgttcagccagaactgcgaaacgatggtgccgggtctgcttggcttcatgctgtttaaagtcgataaccgcatggaagatattaagcttttcggcggcagcaaggcgaagtttggggttgtgaagatcctctttgactacctcgtcggcatcgaaagccacgttatccgcgccgtggagcacgcgaacactgtttctaaccgcttcactgtgccgtcctcgtatgcgcacctcaaaaagctcatcacaggcgtcatcggctacggctgcaagatgggcgagggttggctcttgaccgcggaaatgatggagcttattgaaagcggctacccgaatatcatctgtgcacagccgttcggctgcctgccgaaccacatcgtcggcaagggcatgatccgcagcctgaaaaacctgtacccgaagtcgaatattgtgccgattgattacgatccgggcgcgacgaaggtcaaccaggagaaccgtatcaagctgatgctggcggttgcaaaggaaaacatggagcaggccgaaaaagagaacgctccgaaagcggaagaataacataagctgaaaaacgcctgtcctttttgcgaggataggcgtttttttgatagacgacgtgaaacggcggttaaaagtctttgattaaactttcttcagaaagtttatggggtctcggggcaaagctcagaggcgcgctccgcagagcgcgaaatctttttgcctaacgaaaaacgaggactgttcagacgtagtgaacccagttgcatggatttcctaaagggttcgcacgcgaacccttagaaaataagtttatcataaaattatttcctcaaaaccggtagcttctccaacagcgggagtaaaacctgcagcaaaagcccggtgcagatgccgcagacgaccgaatacagcacgagcgcgggaatataccccagcgcgccgaagccggtcatccataacgcgacgagcagctgtgcgaggttgtgcccgaacgcaccgcagacaccgatgaagaccggcgtgaattttgtttttttccacagtatgcccatgatgagcgtgctcaaaagtccgccgcaaaggctcatcagcccggcggaaacaccgcgcgtcaaaaacgcaaacagacccttgattgccgcaatgaacagcgccgcgggcaggccgatagcgccggcggcgaacatggtgacaaggtttgaaagcccggcttttgcgcccggcggcatgcccggcagcgggggcaggagattttcgaggattcccagcaccagtgccagtgcacccaatagtccgatgagcgcgatgtgctctgcttttttcttcatggatgtcctttcgattttgaggtgtttttttctaaggctcgcgttggctcgccctttcaagggaccccctaattgggtcccttgcggctaaactgtccactggacagtttagcctatcctcctgattttgaagtaggcaaaaagatttcgccatttgcgaatggcgacttagggcgttgccccgagacctcacgaccttttgaaaaaggtcgacgaaaactttattcgtcttgtttcacatcacagcagtgtgagctgttcaacttctacggggatcaagtggatgatctcaaggccctcttttttcgctcttcttacggtataagcggtgccgccgcgtttggcggcagggtcgcgcagatagcagacgcagtagccgctgcgcgctaccatggcgtcgtcacgccgcagcatacagtccggcgtataccgttcaaaaaggaattccgcagtatcggcctgatttaaaatttcacggtagcggcgcttttccgcaaaatgccagcggtcgctttgccctttgcacggcaaaatgaggtgcagccgcacgggcagagcttcgcgaattttcaagacggcttccgccgccatggtgtcaaatcctcttgcgccgccggtgtaaaactccgtcacgcctttttctgcatataatctttgaatttcggagagcagcgccgcgcggagcggttcccggtcttcgggcggaatttctcggtgtcctgtaaagcagcaggcatttttccgcatggcacagcctccttttcgtttgatactcatagtttacagctttttcataccgctgtaaagatgtacggtggactttaaaaccaatctgtgctaaaattgttccgaaactcaaacggaaggaatttcgtctttatgaaagcaaacgtaaagcgcccggcgcgtttttcttttaaaacgattacggaaaaggaagcgaaacatctgacgctgatttttgttgcagttttgtttttggtgatcgttgtcttggcgctgtttccgcttttggaccgcgaagaagaacggtacgaggtgacgacctacgccatgggcagctacgtgcagcaaaccgtttacggcgaaaaccgcgaggacgcggccgtgaaagcggcggacgcggtggaagcgctggagcagaaaatctcttggcgtgtggagaacagcgatattcagaagctgaataacaacgcgggcaaggactgggtgacgctgagtgatgaaacgctgaacattttaacgcaggcgcagtcggtttcggaaaaaagcggcggcgcattcgatgtgaccattgcgccgatctcgcgcttatgggactttgatgacgaattgaacgaagtgccggacagtgacctcatcacatccttactgccgtatgtgaatcactctttgctgcgcatagacgaaacggagcagacggcgtctttgaaaaatctcggcatggcggtggacctcggttcggtcggcaaaggtgcggcgtgtgacgcggcagtcagagcctacgaagaagcgggcgcaaaagcggctatcattgcggtcggcggcagcgtgggcgtatacggcgaaaaaagctccggcaagccgtggagcgtggcggtgcgcgacccgaacggtgacggctctctcggttcggtaacgctggcggagggctttgtctccacctccggcagctacgaaaaatactttgagcaggacgacgttttataccaccatctgctcgatccgaaaacgggctacccggcagaaagcggccttgtttccgtgacggtcgtcgcgaaaagcggcgtgctttccgatgcgctttccacagcgtgctttgtgctcggcagagaagacggcatgaagctgctggaagaattcgatgccgaaggtattttcatcaattcggacaacaacatcacggtgacggacggactgaaagaccgctttacacgcacaagccgcgattacacgcttgtttcctgaaagaggggctgcgatggaaaagcgaaaattttcatggaaagaagcgctcctgctcgttttggtgctcgctgtggcggcaggcgtgtatctctatgccaaaacgcgcccaaagggggcagaggccgtcattgagcaggatggcgaagtgtaccgccgcgttgtgctggccgatttaaaggagccattaacgctggaagtgaacggcgcggtgattgagcttgacaaagacggcgcacatttcgtttcaagtccgtgcccggacaaaatttgtgtgaacaaggggattatcaagcgtgcgggagaatctgccgtgtgcctgccgcagcgcgtgagtgtgcgcatagagggcggagacagcgagatagactccgtaacgggataaaagaatattaccatagaaaaagagacgcaccaaaaggtacgcctctttttctgaagggataaaaaatgaaaaatataaaaggtaaggtaaactcaaattgaatgtgcaaaggcttacttctttgcgggcggcttgatcttgccgatggccgtaatgatgatctccgcaacctcatcaatatcgaattcggaagaatcgatggtgaggtgataattcgaaagatcgtcccagcgcttattcgagtagaagttgtagtaattcgctctttgcttatcacgttttgtgacaaaatcggagaccttcttctcatcgcacagacctttgctcaaaatgcgcttgatgcgcgcttccttattggcgtggatgaatacgcggaacacgttgtcgtactcgcgcaggatgtagtcgccgcagcgtccgatgatgacgcacgggcctttatccgcagccgacttgatgatgtcgctttgcagaatgaacagcttatcgttgatgggcatatcgttgatgccggtgatacggcttccgaaggtgtagtttcccatcaccatggaatacaaaaggctgttgcccgctttttcgtccgccttttcaaagacttcctcgctcagcccgctcttttttgccgccatggcgatcagctgcttgtcgagaagggggacattcaatttttccgccaggcgctcgccgacctcgtggccgccgcttccgtactgacgcgcaatggtaataatcggtaacatagactcgcctcctcgggtttctcaacataaagtgtacaaaacacccattccgcccatctctatgcgacaaaaccggaaaggagattgtaaaaacactctaaaatgagaaaaaatacttgaatgatttgtatgtattttctataaaatatcttactccacttttcccgaaatgtcaacaggcaatagaaaaatttcttcgtgaaagaaataaatcgtggaaatacttgaaaacagggccggatatttatataatttccacatggaataaaagcgggaaggcgcatacggcatggcagttttcattcggcattcaccgctttttcacaaaagtgcgttatgatacaggtaaacggagcggaacagttaaaaggaggccttgtcatgtacagaattttagtcgtggacgatgaagcgaaaattcgcctgctcatccgcaaatacgcggagtttgaggggcacgaggtgacggaagcggaaaacggcatggaggcggtgcgcctgttccgcagaacgcccgatgcgttcgatattgtcatcatggatgtgatgatgccggagcttgacggtttttcggccgtggcggagattaagaagattgcatcgccggccgtcatcatgctttccgcacgcggcgaggagtatgataagatccacggctttgaactcggcgtggatgattatgtcgtgaagccgttctctccgaaagagctgatgatgcgcgttgccgctgtgatgagccgtgtgcagcgcaccgcaataccgaagcacgagttgttccgggcggagggcctgacaatcgattttaccggacggatcgtcacggtggacggcgtgcgtgccgatttgtctccgaaggaatacgacctgctgttttacatggtgaacaaccgcaacatcgccctcacacgcgaaatgcttatcacaaatgtttgggggtatgatttctacggtgacgaccgcacgctggatacgcacatcaagctgctgcgccgcagcctcggcccgtacagtaaattcattgtgacactgcgcggcgtgggctatcgctttgaaacgcacggcgcataaggacggcgggactatgggcgaacagacagtaaagaagcataaattcaaaaaatggcgcaagccgggcatacgcatgcaggtcatgttggggttcgtgctgtttacggcggtcattgtgacgttgctgtggacatttcagatcacattgctcaacacattttataaagccatcaaggtcaatgaggtgcgcagcgtggcgaaccgtgtggtggcgatgctggacgaaagtgcctccgcgagcgattattttgaagtgacgcgctcgacgaatatttctatcctcatttcaaacagcgatggctcaaatgtgtcgttttccccggcggcgcgcggcggcgtgctggagcgctttgattacctcgattgcaagcagcttttcaccgaggtgaaagcggcgggcggcagcgtgatggacgacaacatcacagacccgacgagcaccatagaacggcaggaccgcacgatcatttacgcgcagacggtcacgctttcgagcgggaacgagtatcttgtgctgctgtcctgcgacgtgatcccggttgattccacggtggaaacgctgaaaatacaattgtggtgtctgacgggcgtaatgatcctgctttcgttcgggctggcactgtttatctcttcgcgtctttcaaagcccttggaacagatgaacgaatctgcaaagcagctgggcgagggaaaatatgacatccgtttcccggaacagggcgcaagagaggtggcggagcttgccgcgacactgaactatgccgcggcggagctgagcaaggttgaagatctgcgccgcgagctgatcgccaatgtttcgcacgatctgcgcacgccgctgacgatgatctccggctatgccgaggtgatgcgcgacattccgggcgaaaacacgccggaaaacgtgcagatcgtcatcgacgaagcgaaccgcctgacaggcatcgtcaacgaccttttagatctctctaaattacaggcgggcgcattgacgctgacggtttccgaattcaatttgacggaggatatccgcaatacgctgcaccgctacgacaagttggcggatttcagcttcccgttcacgtatgaccgcacggtgtatgtctgcgccgatcagctgaaaatttcgcaggtgctgtataaccttgtgaataacgccattaactattcgggcgggaacaagaccgtgtatatcgaccagaccgtgacggaaagcaccgtgcgcgtatctattcgcgatacgggcgagggtataccggcggataaattgcagtacatctgggatcgctactataaggttgataaggagcacaaacgcgcacaggtcggcacgggattggggctttccatcgtgaagaaaattctggacctgcacggcgggcggtacggcgtcgcgagcgtggagggtaaaggcagcacattctggtttgaactgccggtgctacgtacggaatctttgattctgccggaaccgctgacattaccggaacaaaaagctgacgtggaacggggcgaataaagttttcgccggcctttttcaaaaggctgcggaaacccggtcaatgggtttcccaaacggcgttacgaaacgtcgtcggaaagatgttcacagtcggctgaattaaactgaaaacagcaagcgtaaatgaactaaaagcgtacccgaaggtgatttgggcgcgcttttttcgcacagagaacgaaacacggaattcgtatttgtgaaagatgtatcaaactcaaaagaggcccgcgcggcttttgttttactttctgaaaaagccgtaaattccgatattttcatagagaaaaatcgcgaaaatgcttgataaaaagatatcgatatgatagaatttattaggctgagtatgtacccctgtgagtggggaaaggggaaaactgtgtttcgcccctttgttttcatgtaactcagaagatctcgcccgcggaggaacattgtgctcccccatcgggcacagcacaggaagggaagtgatccgggacaatgaaaagcaaaatcaccgtaattggtgccggtagcgtaggtgcaaccattgcatatacgctttccaacgaagacatcgcaacggagattgtcctgatcgacatcaacaagcaaaaggcagagggcgaagtgatggatatcattcagggcacctgcttccgcgacccgatttccattaaatcgggagattacgaggatgcaaaggactccaacatcgtcatcattacgtccggcgtggccagaaaacccggtcagtcgcgccttgaattgacgcagacgaatgtcgacatcatcaaaagcattgcaccgaacatcgcaaaggccgcaccgaacgcgctgtacatcatcgtcagcaatccggtggacatcatcacctacgtgttcatgaaaatctccggcatcccggaaaaccagatcatcggctccggcaccgcgctggataccgcgcgtctgcgtttcggacttgccagccactttaacattgcgcagaagaacattcatgcctatgttttcggtgagcacggggattcttcctttatcccgtggtcgtgcgcagaggtttccggtgcgaaactggacgactatgtggagctgatgcatgccctgcccgtggacaaggacgccatggcggagtatgtacataaatccggcggcgagatcatcaagaacaagggcgccacgttctacgcggtcacggtttccgtgtgcagattgtgcagcatgctgctttccgcatacaattccatcgtgaccgtttccaccatgatgcacggtgaatacgggttagaggacgtgtgcatcagcacactcgccattgtgggcccgaacggcgtgcagggcaagctgcctgtgaggctgacggaggacgaaatgcaaaagctccacgcttccgcagacaagctgaaagaaaccatcggtcaaatttattttgaagcataacccaaaatcaatttatagaaaggatgacaggagtagctatgaagtacagctattatccgggatgtaccttgagaacgaaggcaaaggatcttgacgcctatgccagagcttccgcaaaggcgctcggatttgaattggaagaaatcgaaaactggcagtgctgcggcggtgtctacccgctcgggtccgacgagatcgcaacaaaactttcctccgtccgcgctttgaacgaagcgaaggaaaagggccaggacctcgtgacgctttgctccgcatgtcatcatgtcatcaaaagagtcaacgacgacatgagaaacgtggaggacatccgcacgagagccaacaactacatgcagcttgacgagccctatgccggcgagacgaatgtgctgcattaccttgaagttctgcgcgaccgcgtgggctttgacgaactgaagaaaaaggtcgtcaacccgttaaagggcagaaagatcggcgcatattacggctgcctgctgctcagaccgagcaccgtgctggcctttgacgatccggagaacccgcagatcattgaagacttcattcgtgccatcggcgcagagccggtcgtatatccgtaccgcaacgagtgctgcggcggctatatctcccttaaagaaaaagaaatgagcggccgtatgagctgcaatatcgtagacagcgcagccggtgcaggcgcggaaatgctcatcacggcatgtccactctgcatgtataatctcaacaagagcggcagcggcaagatcccggtgtattacttcaccgagcttctcgcagaggcccttggcgtgaaagaggaggcgttaaagtgagcatcagcaaacaggcggagcagatccgcgagatcagcggcgtcaacccctataagtgcatgaagtgcggcaaatgttccgcatcctgcccgtcgttcaacgaaatggacattaagcctcaccagttcgtttcctatgtgctgaatgacgatattgagtcccttgtgaattccaagtccctttggaagtgcctttcctgctttgcctgcattgagcgctgcccgagagacgttaagcccggcaagcttatcgatgcggcaagacagctcgtcgtgcgccagcgcggtgaagcataccttacgccggacgagatcccggagcttttggatccggatctgccccagcagctccttgtgagcgcgttcagaagatacaggaggtgatagcgtgcagagaattggtgtatttgtgtgccattgcggcagcaacatcgcagctacggtagatgtaaagaaagtcgtagaaatggtcagtcatgaaccgggtgtcgtgcacgcggaagattatcagtacatgtgctccgaggtcggccaagcgaagatcatcgaagccatccgcgaaaaacacctgaccggtcttgtggtttgttcctgctccccgcgtatgcacgagacgactttccgcaaaacggcggaaagagccggcctcaacccctacatggtcgagattgcaaatatccgtgagcactgctcctggatccacaagaacatggaagaagcgaccgaaaaggccgtcatccttgccagagcggctatcgcaaaggtcaatcttgacgcgccgctgttcccgggcgaaagccgcgtaacaaagcgcgcgcttgtcatcggcggcggtattgcaggcattcagactgcgctcgacattgcagacgcaggctatgaagtcgatatcgttgagaagacccccagcatcggcggccgtatgagccagctcgataaaacgttcccgacgctcgactgctccgcatgtattttgaccccgaaaatggtggaggcttccgcaaacgagaagattcatctgtatacatacagcgaagtggagaaggtctccggcttcgtgggcgatttcaccgtggacatccgcaagaaggcgcgcagcgtcgatatgtctaagtgcaccggctgcggcgtctgccaggagaaatgtccttccagaaagaccccgagcgaattcaaccgcggcttgaacacgagaagcgctatttataccccgttcgcacaggcaatcccgaacgtcccggtcatcgaccgcgaagcttgcatcaagttcaaaaccggaaagtgcggtctgtgccagaaggtttgtcaggcgggcgccatcgattacgagcagaaggatgaaatcgttaccgagaagtacggcgctatcgtcgtcgctaccggcttcgataccatcaagctcgataagtacgacgagtacgcatacagccagagcaaggatgtcatcacgtccctcgagctcgagcgtatcatgaacgcggcaggccccacaaagggtcatctggagcgcctttccgacggcaagcacccgaagaatatggtgttcatccagtgcgtaggcagccgctgctccgataagcgcggtaagagctactgctccaagatttgctgcatgtacacggcaaagcatgccatgttgatccgtgataaatacccggacgtcaacgtaacggtgttctacatcgacgtgcgtacccccggtaagaacttcgatgagttctaccgccgcgccgtggaagattacggcgtaaactacatcaagggtcaggtcggcaaggtcatgccgcagccgaacggccagctgcttgtgcagggcgttgacctgctcgacaacaagcagatcctgatggaagcggatatggtcgtcctcgcaacggcgattgagccgaacgcggacgtgcgccgcattgcgaccatgctgaccgccagcatcgataccaataacttcctcaccgaggctcacgcaaagctgcgcccggtcgagtctccgacggcgggcgtattcctctccggcgtatgccagggcccgaaggatattccggaaacggtcgcgcaggcaggcgcggcggctgttaaggccatcggtctgctcgcgaaggataagctgatgacgaacccgtgcaccgctaagagcgacgagctgctttgcaacggctgctcgcagtgcgcaaacgtctgcccctacggcgcaatcagctatgagacaaagctcatcaacgaccacggcatccgtgaagatcgccgcgtagccgttgtcaacagtgcgctgtgccagggctgcggtgcctgcaccgttacctgcccgtccggcgcaatggatctgcagggctttgcaaacagacagattcttgcggaggtggatgcaatatgtcgataacagcaaacgaagagttcaagccgaagatcgttgcgttctgctgcaactggtgcagctacgccggcgcagaccttgcaggcagcagccgcttggtttatccggcagacgttaagatcatccgcgtgccgtgctcctgccgtgtgaaccccatgttcatcctgcatgcttttgaaaagggcgcagacggcgttatcctgtgcggctgccacccgggcgactgccattacagcaccggcaactactatgccagaagaagaatggcgcttctgttctctatgctcgattacatcggcgtggagcacggacgcacccgtgtggaatgggtctccgcagcagagggcgtaaagttctcccagaccatgaatgagttcgtggcgaagattacttcgctcggcaagaacgtcagactggaggatttgagatgcaggaaatgatcaaccgcgcaaaagagctgctcagcgatggcaccgtaaaccgtgtgctcggctggcgtcgtggcgatatgtcctataacccggagccgtcttactttgagacggcggaggatctggacgcaaacttcgtctacaacggcttctgcggcgcgaacctcagtaaatatatgatcgagggctcgaagcttgagggcaagacgcttgtcttcctgaagccctgcgattcttacagcttcaaccagctcatagcagagcaccgcgtagaccgtgataaggcttacattatcggtgtcggctgcatgggcaagctcagcttcgagaagatcaaggagcagggcgttaagggcatcacgaacatcacgatcgacgatgcaaacgagaacatcaccgtggagacgctctacggtgaaaagacgctcgcctataaggattgcatgctggagcgctgccatgtctgcaagggcaaggagcaccagattttcgacgagaccatcggcgagagccgcgacacaaaggacgcagaccgctttgcagaggtcgagaagatcgaagccatgagcccggaagaaaagttcgctttcttccagaatgagctcagccgctgcatccgctgcaacgcctgccgcaatgtgtgtccggcgtgcagctgccgcaagtgcgtcttcgacagcacgaagttcgacagcgcacagaaggcgaacgtggactcctttgaggagagaatgttccacatcatccgtgcattccacgttgccggccgctgcacagactgcggcgagtgcagccgcgtatgtccgcagggcattccgctgcatctcttcaaccgcaagttcatcaaggatatcgacgaattttacggtgagttccaggccggtgtcgatccggaggcaaagagcccgctgacgagctttaccttcaacgacgttgagccgggcgttaccgggggaaggagataagccatgttcaagattgcaaaaagtaagctgcccgagctgctgaaagcgattgcggcacagcaggagctgttcctgccggtgaacaacaacggtcaggtcaacttcgccgcgtggtttgaaggctgcaatgcagacattgaaacacttaagacggtgaaatctccgaaggacatgttcttcccgcagagcgaaacgctttacacggtcaaaaaagagcagcacaagctctccgttgagccgcaggcgcttgcagatcagaacttcgtcgctttcggcatgaaggcctgcgacattcagggcattaaggtcctcgataaggtcttcctcgctgagccggtcgatacgttctaccgcgcaagacgcgagcacggcaccatcgtggcgcttgcttgccacgagccggaggagtcctgcttctgtaaggttttcggtgttgactgcgctgagccggacgccgatgtcgtcatgtggaacgcaaacgacacgctctactggaaagctgtaacggacaagggcaccgcccttaccgaagcgctctccggcgtgctcgaaaatgccgacgcagcggacgaaaaggccgtggagaccgaacaggagaacatccgcgcaatcgtagagaagctgccgtacacgaatctctctctcgagggttggaacggcaacgtcaccgaagaaaaattcaactcccccgtttgggagaagctttataagccgtgccttgcgtgcggcacctgcacctttgtgtgccccacctgccagtgctatgatatcaaggactacgacacgggccacggcattcagcgttatcgctgctgggactcctgcatgtactccgactttacgatgatggcgcacggcaacaacagaacgagccagatgcagcgcttccgtcagcgcttcatgcataagctcgtgtacttcccggcgaacaacgacggcatgtattcctgcgtaggctgcggccgctgcgtggaaaagtgcccgtcctcgctcaatatcgtgaaggtcatcaaggcgtttgaaaaggaggctgcaaaccatgagtgatacctgtcattgccatgataactatgtaaaagacgttctgatcccgcaggtcggcgtcatcacggacatccgtgaggagaccccggacgtcaagacgttccgcgtcaatgcgccggagggcggcaagctcttcgagcatatgcccggccagtgcgctatgctgtgcgcaccgggcgtcagcgagggtatgttctccatcacctcttcgccgacgaacaaagaataccaggaattcagcatcaagaagtgtggtcagcttacagactacctgcacagccttgaggtgggcgatgagattaccgtgcgcggcccgtacggcaaccacttcccggtagaagacaaattaaagggcaagaacctgctctttatcgccggcggcatcggtcttgcaccgttgcgctctgtcatcaactacgtgctcgacaaccgcagtgattacggtaccgtagatattctgtacggttcccgttccaaggatgaccttgtacagctgaaggaaattcaggacgtatggatgaagacggaaggcgtgaacgtatatctcacgatcgaccgcgagcaggagggctgggacggccacgtcggctttgttccggcatacctcaaggagctcggcttcgatacaaacaaaacggcgctgctttgcggacctccgatcatgatcaaattctgcttagcatcgctgattgaaatgggcttctcgaaagaacaggtctacaccacgctggagctgcgcatgaagtgcggcatcggcaagtgcggccgctgcaacatcggttccaagtacgtctgcaaggacggcccggtgttccgctgcgacgagatcgacgagctgccgaacgagtattaagaaaggggttggcgtaacatggaaaatatggtaaatgtatattttttcggtaagaagtacagcgtccccgcagacctcacgattatgaccgctatggaatatgccggttatacgctgaaaagaggctgcggctgccgtcacggtttctgcggcgcctgcgcaactatctaccgcattaagggtgtgaacgagctgaagacctgccttgcctgccagacacaggtgcaggagggcatgtatgttgcaagcattccgttcttccccacagacaagcgtacttatgacatcaacgagatcaagccgaaccagcagatcatgatggagctttatccggaaatttacagctgcatcggctgcaacgcctgcacaaaggcctgcacgcagaacctgaacgttatgcagtacattgcatacgcacagcgcggcgagcttgaaaagtgcgcagaagagtccttcgactgcgtaagctgcggctgctgcaccgtcagatgtcccgcgggcatctctcacccgatggtcggcctgctggcaagacgtcttaccggcaagtacatcgagccggagagcaagcacctgacaaagcgtgttgaagagatccacgagggtgcatacgacgagctgattgagcagatcatgcagaagccgatcaccgagatgcaggagctctataacaacagagagatcgagaaataaggagggtatagccatgtttacaccggaaatgcttgcctctgtcaaaaaagtagaggcaaccagacaggaacgcctgggcatggaacccagacgtatgaccgcagaagaaaaggatgcccttctgaaggcgtaccatcctgattacagagaagacggcttcgataccattaagatcggcccgaacaagggtgagaaggtaccgaaggagcttggtcacctgctgcactccaacagccgtttgctccatcacccgatcgatctgacgaagattgattacgacaccgacgtgctcgtcatcggcggcggcggcgcaggtgcttccgcagctattgaggcggacaacgcaggtgcaaaggtcatgatcgtgacaaagctgcgcatcggcgacgcgaacacgatgatggcagaaggcggcattcaggctgccgataaagagaacgattccccggttcagcattacctcgacgcgttcggcggcggccacttcgctgcccgcccggaactgctgcgccgccttgttatggaagctccggacgccatcaagtggctgaacgagctcggcgttatgttcgataagaccgaagacggcaccatggtcaccacccacggcggcggcacctccagaaaaagaatgcacgcctgcaaggactactccggtgcggagatcatgcgtaccctgcgcgacgaagttatcaaccgcggcatcccggtcgttgagttcacctctgctgttgagctcatcaaggacgaaaagggtcaggtagcgggcgctgttctcctcaacatggagaccggcgactacatggtcgcacgtgcaaagaccgtcatcatcgccaccggcggtgcgggacgtctgcactaccagaacttcccgacctccaaccattacggcgcaacggccgacggccttgtgctcggctaccgtgcaggcgctccgctgctgtatcaggataccattcagtatcacccgaccggcgttgcgttcccggcacagatctacggcgcactcgtaacggagaaggttcgttccctcggtgcaatgctcgtcaacgtagatggtgaagcgttcatgcatccgctggagacccgcgacgttgctgcggcttccatcatccgtgagtgcacagaccgccacaagggcgttaccaccccgctgggttccggcgtttggctcgacaccccgatgatcgagcagatcggcggcgagggcaccattgagaagcgtatcccggctatgctgcgcatgtacctgaactatgacattgatatgcgcaagagcccgatcctcgtttacccgacgctccactaccagaacggcggcctcgagatcggcggcgacggattcacaaaggctatcagtaacctgctcgttgcaggcgaggctgtcggcggcattcacggccgcaaccgtctgatgggcaactccctgctcgacatcatcgtatttggccgcaacgccggtaaggctgctgccgcgaaggcgaaggagaccgagctcggcacccttaccctcaagcatattgaggactatgcagaagagctgaagagcgcaggcatcgaatccgaggatgtttccccgctgctgctgccgcattacgctcgtcacgagagataattttttccggaaaggaatggatagatccatgcgtgaaattgaagttagccagatcacagacattgttgagaagctgtgcatcgcggcaaacgagcacctgccggaggacgtaaagtgcgccatccgctcctgccgcgcctgcgaagacggccagatcgcacagggcattctggacaacatcatcgaaaattttgaaattgcagataacgagtgcgttccgatctgccaggataccggcatggcctgcgtattccttgagatcggccaggacgtgcacttcgtcggcggcgaccttacggaagccgtaaacgagggcgtgcgccgcggttacgacaagggctacctgagaaagtccgttgttaaggacccggttcgccgtggcaacaccggcgacaacaccccggctatgctgtacaccgagatcgtcccgggcgacaaggtgaagatcaccgttggcccgaagggcttcggcagcgaaaacatgagccagattcgtatgttcaagccgtccgccggcttgcagggcatcaaggactttatccttgaggtcgtagagaccgcaggcccgaacccgtgcccgccgatggtcgtcggcgtaggcatcggcggtacgtttgataaagcagcgctgcttgcaaagaaggcgctcatgcgcccgcttgattccgagaacccggacccgttctatgcagaccttgaaaaagagatgctcgaaaaggtcaaccagctcggcatcggcccgcagggcttcggcggcaagacgacggccatcggcctcaacatcgagaccatgccgactcatattgccggcatgccgtgcgctgtcaacatcaactgccatgtaacgcgtcataagacggaggtgctgtaaaatggaaaagcgtattacactgcctttgactgcggagctcgcaaagacgctccatgccggtgacagagttctgctgaccggtaccatctatacttctcgcgatgccggccacaagagaatgtgtgaggcacttgcacgcggcgagaagatcccgttcgatcctacggacgctacgatctactacgtaggcccgaccccggcaaagccgggtcatgtcatcggttccgcaggtcctaccaccagcggccgtatggacgcgtatgccccgaccatgatgtccgtgggcgcacgcggcatgatcggcaagggcgctcgtctgccggaagtcgtagaagccatgaagaagtataacggcgtttacttcggtgccatcggcggcgcaggcgcgctgctcgcaaagtgcatcaagaaggcagagctcatcgcgtatgaggatctcggcgccgaggcactgcgcaagctgtatgtagaggatatgccgctcgtcgtcattatcgacagcgaaggcaacaacctttacgaagaaggccgcgcagagtaccttgcagagcacaaggcacacgaagcggaaaagaacgcttaagttgtaaaaataacaggagcggaactatgggttaggttccgctcttgcttatattaaacaggatgtgccgcgcacagctttcagaattttttgcacagtgcattccgaaaatttagtttaaggggaataaacgcatgacacctgaaatgattgctgaaatactggaaaccgtaatgatccttgcattcggtctttcctggccgctttccatttacaaatccgtaaagtccagaaccgctaagggcaagagcctgcagtttgagatcttcatctggctcggctacatcgccggcattgtgatgaagtgcatccagttctttgtcatcggcaagagcggtccgatcttcgttttgagctgggtcttctattgcctgaacttcatcgagatcaccatcgatatgcttctctacttccgcaacgtgaagctcgataaagagaacgagggtaagtaatttcacatgtgtccgaaacggcagcctgcgggctgtcgtttttgcgttgcatcaaaaaaagacggacaccgaatgcccggtgtccgtctgtgtttattaagctaaaattacagcataaggtcgcgaatgtacttaatggtgtacttaacgcccttctcgcctttttcgccctgccaagtcatggagtgcggttcaattgcgaggtagccgtcataatcgtgctgatacagcaccgcgaagaatgcgcgccagttgatggaatcgatgcctgccggcgggttgtcgtagtaacgtctgtctgccgcaaagtcgctcatcagctcgtctttgagctccgggtgacgaaccatcaactcgcggtttttccactctgacggctcgtgagagtcgccgtactggataacgccctttacgtggcaatatacgaacttgtcgccccattccataccttccttgaggtatgcgcccttgtcgccgccatgtacgaagctgtgggacggatcatacttgatgccaaggccaggaacttcgtccagaacaagcttccactgctccggcgtgcgaatgtagttgccgcccatcatgcagttgacaatgccgcacttcatgccgttttcctttgcgtaggaaacgatctggttcaaaaccttaatagccgcggtgatgttcttgtagtaggaaagctgcggaacatacgcaacgctgcacagataatgctttgcgccgagtgctgcgccgaaatcgatggctttcttcacttcgctccactccgcttcgatcacgtcgccgttctcgtccagaatatggcttgcccagcggcctaccgcgccgacttcaacgccggtctcttcaatggcctttttgatctcgtcctggttcttgacgacctcgtccagcggacgaccgaaaaattcagtcgggttcaggtcaaactcaacgaagtcgagtccgagttcttttgcgtgtaccagtgttttggcttccggtgcaccgataataccgagtttcatagtgattcatcctccaataagaattaaaaaataacttgatcggcaaacactgccgatttttaccatgttacgccgagcacgtgcaagtcgcggtcagtctgttccttgttttctaccgtgatggtgtgcagaccaaattcccgcgcagcttcggtgtttttcgcgttatcatcgaggaaaacggcgttttccggcgtgatgtcgaagcgctcgcacagtgtttcataaattttcctgtccggctttacgagttttacctcgtacgaaatgagtgcgccgtccgcatacggcaggaaatcaaacgtgtctttcacacggttaaagccgaattcgctgaagtttgaaagtatgtagaccttatagcctttctttttcaaatcgcgcacccagtccgccgcgtaagggtacacggtgacaagctcgtggctgtcgtgaacaatgcgcctgatttgctccgggtagtccggcgcgtttttcgtcaacagcgcgacaacctcttcctctgtcagcacgccgcggtcgatctctgcccactcgggactcatcacggttgcgtttgcaagtgtatcgacaagatcttcgccgaaccactccacaaagctgttgtgccagtgccattcggtcaacacatttccaatatcaaaaataacggtatcaatcataaaaaatcttcttcgcctcaaacacggcttttcctttgtgatgatttgtgttataatagagacggaatttcaggtaaaattcacattcttttgtttattatactatgaaaagctcaaaattgcaatgcctttttgacggaatacacatacgcatttaaggaaagttgccgtgtgtaaagtcgggcgtctatacggaaaggatagctttcacaaatttgaaagccggggaaaacagcatgacaaattacgcggccgcgctggcggcgcagtttcacttaaaagaacagcaaacggcaaagctcattgagctcatcgacgcaggcaacaccatcccgtttatcgcgcggtacagaaaagaggagcacggatcgctcgatgaccagaccatccgcacggtgtacgagcgcctgcagtacctgcgcaatcttgatacgcgcaaagcggaagtgcgcgagcttatcgagggcacgggaaatttgacgcccgaaattgaaaaaagccttataaatgcggcaacgctggcagagatcgacgatatttaccgcccgttccgcccaaagcgcaaaacgcgtgccggcatggcaaaggagcgcggcttagagccgctcgcaaagaaaattctggcgcaggaaaagggtgttgacccgatgaggctcgccgagggttacgtcaacgcagaaaagggtgttaatacgtcggaagacgcactgaacggcgcgaaggacatcatcgcagagacaatttccgacgatgccgttatgcgccgccgcctgcgcatggctgccatggcgcagggcgtcatcacgagccgtgccgcaaaggacgaggattccgtgtatcgcatgtattatgaattctctcagccggcggcaaaaatcgcaggccaccgcgttctggcgctggaccgcggtgagcgcgaaggccttttaaaagtttcgctcgaaatggatgacgtgcgcgggcaggcaatcttgacctccgcttacgtaaagggcaattctgcgtgcagcgaagtcgtacgcgaagccgcagttgacgcatacggccgtctcattttcccgtctatcgagcgggaaattcgtgcggagctgaccgaaaaagcgtgcgacaacgccattaaggtgttttccgtaaacctccgtcagcttttgatgcagccgcctgtcaaaggccgcgtgaccatcggtcttgatcccggctaccgcacgggctgcaaggtcgccgtcgtcgatgccacgggcaaggtactcgacaccggcgtcatttatcccacgcacagtgaggcacgcgtgcgcgaagccaaacagacgctcgtaaggcttatcaaaaagtatggcgtcacactcattgccatcggcaacggcacggcgtcgaaggaaacggagatcttcaccgacgaaacgctgcgcgaaaatcatcttgatatcgattacatggtcgtcagcgaggcgggcgcgtcggtttattccgcgtcgaagcttgcggcggcagagtacccggagtacgacctgacgctgcgcagcgccgtttccatcgcgcaccgcttgcaggatccgcttgcagagctcgtgaagattgacccgaaggccatcggtgtggggcagtatcagcacgatatgcccgcaaagcgtctggatgaagcgctcggcggcgtagtcgaagcctgcgtgaatgcggtcggtgttgacctcaacacggcatcaccgtcgctgctcgaaaacatcgcgggcatttcctccgccgtggcgaagaacatcgtcgcgtatcggcaggaaaacggcgcgttcacaacgcgcacgcagatcaaaaaagtgccgaagctcgggccgaaagcgttcgagcagtgcgcaggttttctgcgtgtgctggaaagcaagaatatcttagaccacaccggtgtgcatccggaatcgtatgatgcggcaggcactttactcaccgcctgcggctatgacctcaaaaaagcgccggagggcggctttaaggggctcaaggaaaaagcggaaaagctgggcatcgcaaagctcgccgtgcagtgcggtgtaggcgagccgacgttaaaagacatcatcgcggagcttgaaaagcccggccgcgacccgcgtgacgaactgcccagtcccatcctgcgcagcgacatcaaggacatgaaggacttaaagcccggcatggagatgcgcggcacggtgcgcaacgtcatcgatttcggtgcattcatcgatatcggtgtgcatcaggacggccttgtgcatatcacgcagatctctgataaattcgtgcgtcacccgtccgatgttttgaaggttggcgacattgtgaccgtgtgggtgcttgccgtagacgtcgcgcgcggtcgtatttccctcacgatgaaaaagccgaaagagcagcaaaattaaaaaatcgcggacagctttgcgctttttgtccgtgaacagttgacatgaaggcctggacgcggtaaacttgttttcggcaaaacacagaaaacatgggggcgaaagaggaaataagatgacagaagaacgcagtgaaagtgcagcggggctttcctttaaaatgggggaggcgctgctcagaaacggcgcggagatttttcgcgtgcaggagaccatggagcgcgtggcgcgcgcctacgacatagaagaatacgacgtgtacgtgctttccaacgcaatctttgcaaacgcggtggaaaacggagagaagatcgacacaaaactgaaattcgtgcccggatccaccgttcatttcgggcgcattgtgggcatcaaccagctttcacgcgagattgtcgcaggtaaagtctcggtagaggaagcctatgcgcgcttgcacgagatcgtttccattccgtatacgcaccccattcggctcgaccttgcgtgtgccgtaggcagcgcgtgcttcagctacctgtttggcggcaccgtgttcgacgccgctgcggcgttcatctgcggctttgttttgcaggtgttcctaaacgccatcgatagccgcacggcctctaaattcatcatcaatctggcgtcaagcgctgttgtggcggtttgcgccgtgctgctgtttaccgtggggctcggcgacagcttagataagattatcatcggatccatcattcgtcttgtgcccggcgtggcgctgacgacctccatccgcgactttttaaacggcgattatctgagtggaaccatccgcataatcgacgcatttctggtcggcgggtgcatcgccatcggcgtcggtgccgtggtgatgacctacatcagcctgacaggaggtgcgccgctcttatgacaccggaagttgttttcgattgggcaatccagaccgcggtggcgtttgtggcaaccatcgcgttcgccatcattttccataccccgcgcgagcaatacgtctgcgccgggcttgtcggcgcatttagctggcttatttatattatctatgtatattttacgggtgatgttgtgttcgcgtcgttttttgcggcgctcggcctcacctatttggcgcgtgtattctcgtttgcgcgcaaagcgccgctgcccgtgttcctcatcgccggaatttttcccgttgtgcccggcgccggtatttattatacgggctatcacattttcatgaacaacaacgtagaggcgatgtccaagggcgtagagaccattaaaatcgccattgccattgcgctcggcatcggcatcgtcgtctcactgccgcgctttttcttcacactgcgccggaaaggaagcaccacttgaaacaggttaccatcgctcaaaacgacgccaaccagcgcgtcgataaatttctcacaaaaacataccctaacctgccgcagtctatgctgtataaggctatccgcaaaaaggacatcaaggtaaacggcaagcgctgcgagatttccacgcgattgcaggagggcgacgtgctgacgatgtacttgaaagacgagttcttcgcgcaggcgccgaaggaatacgattttctgaaagccccgctgaagctcaacatcatctatgaagacgagaacatcatgatcctcgataaaaagccggggctcatcgtgcacccggacgagcattatcattttgattcgctcattgcgcgcgtgcagcactatctttacgaaaacggggagtatgacccggaagcggaaaattctttcgccccggcgctcatcaaccgcatagaccgcaacacgggcggcatcgttatggcggccaaaaatgctgagacactgcgtatcatgaaccaaaaggttaaggaccgtgagatggataagttctatctctgcgttgtgtgcggcgtgccgaagaagaaaacggatattttaacgggctatcttgagaaaaacgagagtcagaaccgcgtgtatatctcgaataaaaaaacgcccgaaagccgcagcatcaggacaaaatacacggtgcttgagacccgccgtgatttcagcctgctcgaggtggagctgctcaccggccgcacgcaccagatccgcgcgcacatggcgtccatcggccacccgcttgcgggcgacggcaaatacggcaaaaacgtgcagaacaaaaagacgggcttcccgtatcaggcgctttattcctataagctcatcttccgctttacgaccgaggccggcatgttaagctacctcgacggccgcgagtttacggcacaggacgtctggttcctcgatgaattccacgcgtttccaaagtaattcaaatcccaatagaacagaaacgctcccgtttccctgcgcagtgcagaggaacgggagcgtttcttgtgtgttataaggatcagaggagtgtgatattaaaagtaattgaacgggttcgtggtgctgccgtagtaaataacttcaaagtgaaggtgcgggcccgtagaattgcccgtagagccgacgtaagcgatcgtttggccgggggagacggtatcacccacagagcacgcaagggcgctggcatgcgcgtagcgcgtggaatagccgttgccgtggtcaatgaacacgcagtagccgtaactgtccatccaagcgctgtaaataaccttgccgccgtctgccgcaacgatgggcttaccgtagatgccgccgcccgcaatatcgatgccgcggtggccgccgtcgccgtaatagcaggtgatgtaggtgtaacccggcatcggccacacaaagctgcccgtgccgatatatccgacaccgctgtcgtaagagccgccggagttcgtgcttgcggctttcaaagcggcgtagtaatcttcgtaccatttatcaatggccgcatcggcctcttctttttccttttcgaggcgctcggcttccgcctgtgcttcggcttcgttctgctcggcctcgtctaagagcttctggttttcgaggtacagtgcggagagctcatcgcttttggaatcgagatcctttttgtcggtgctcagttcttctttgtccgcgttgattttttccacctgctcctgaatggaggtcagttgctcttcaagcgtgtccaaaagctcggtatcgtgctttgtaacggactgtatgacttcacttttctgcgtgtaatccacaaggcttgtgctgctcagcaaaatggaaaggttagaagcttcgcccgccatgtataaggcgcgcaggcgctttttcagtttcgtataatttgcgttgatgctgatgcgtgtgtcagcaatatcctgctcgccctgttcgatctgcgcatccagctcgttgatgcgctgcaccagaatgtcaagctgctgctggataatatcgatcttgccctgcagctcgtcgcggtaggcgcgcttttggcttacgtcatcacgcagttcttcaaggcgtttgttgttttcttcctcttgcttttcgagttcggcaagctgagattttaagtccgtgatggattctgccgaaacgttcggcagctgcaccacgccggaataaaaggctaaaagacctgcaagcgtaaacgcggtcagaccgcgcagaaagctgtgcttacgcaactgcgttctctccttcgttattgagatatttgccgatggaaatgctgccgccgaaaaggccgaacagcgcaccgacaatggcgtagcccgcaatgatgtacatcacatacgggtcgatatccacagcgttaaggaacggcacgatgttataaagcgcctgtaccgcgtacttataggcaacgagcagaatcgcaacggaaatgccgccggaaatgaggccgatgagcatgccctctacgatgaacgggatgcgcacgaagccgttcgttgcaccgacggacttcataatgctgatttccgtgcggcgggagaacatcgtgaccttaacggtgttggaaatgatgaacagggaaacgatggcgaggatgacgatgattgcgaggcttgccacgcgcacgatcatatcgatgttcgaaagctttgtggcaatgtcgctgtaatcggtgtagtgatccacgccctcaatggcctgtatctgctgtatagtttcgtcatatttggagagatcatgcatggaaatttgataagcgtccggcagcgggttttcgtcgccgtccaaaccctccagcacaacggcgttttcgccgagcaagtccatcatgtcggcaagaccgtcgtctttcggcacaaaggtgcattcgctcacgttttcgatgctgcgaatctggtcgccaacctgcacggcggaaagagacggcaaaccgttcgtcagatacaccgtgatgctgttgttgtcttcaatggaggacatcatggaggtaaggttgatggaaacaaggcttgcgcagccggtcaaaagcaggcaagagatcagcacgccgatggaggcgatactcatcgttctgtttttccaaaggttttttacgccttctttgagcaaatatccgaaattatgaaacttcatgggaatctgttaccatcctttcacacaggtcagccgtttgcctggtcgttgttttgcggagccgtgaattctttcgttgcatacggctgtgcgtcggcatccgccttggcgcgtgcttcctttgcacggcgaatggcctcgcggtctacggctacggtctcctgtgtggcaacggcctgtgccgcagcctgctgctccttggagatggcagcggtatcggccacaatctcgccgctgtgaatctgaatgatgcgcttgtggaagtgcttgacaagggagtgctcgtgcgtgaccatcagcacggtggtgccgcgctcgttgatggcgctgagcagatctacgatctcgtaggaaagtgccgggtcgatgttgccggtcggctcgtccgcgatgatcatggaggggttattgacaagggcgcgcgcaaggcccacacgctggcgttcgccgccggacatttcggtggggtaatgctttgctttgtgctgtaagcccacaaggcccagaatatacggcacgcgctttttaatggctttcggggaggcgcccacaacgcgcatggcaaacgccacgttgtcgtacacggtcatgtggtcgatgaggcggaaatcctggaacacaaggcccatttttctgcgcacatacgggatcttgcccttgcggatgtggctgatgtcctggccgtcaatgagcacctgaccttcgttcgggcgctcctcacaggtaatgagcttcaaaaaggtacttttgcccgcgccgctggaaccgacgataaagacgaactcgcctttttcgaccttcaggttgatgttgtgcagcgcttccgtaccgttattgtaaactttagaaacattgcggaattcgatcaaagtgtactcctcctttggagatataaataaactcggcgcggcagaatgcccgcccggtcatttgcaaatgaaaatctcatttgggtgaaataccgcagaaagcctacgataccaccttgctattataccaacatggtttgcatttttaattctaaaaaagaattattcgttatacttttgtaacttttgtaacttcttgtaatgaaaaatttgcgcagaaagcagcagcgccgcacaaaaccgtgtaaaggctctgtgcggcgctgcattaggaataaataaaacgagaaatcaatcagaatttagaggggctgctggaaaggtactttttgaccatcagcgctaccttaaagacgatggcgtcctcaaactcacgcaggtcaaggccggtaatcttcttgatcttctcaaggcggtaaacaagcgtgtttctgtggacgaacagctttctggaggtctcggaaacgttcaggttattttcaaagaaacgctgaatggtgaacagcgtctcgtggtcgagggactcaatggagccgcgcttgaaaacttccttcaggaacatttcgcaaagcgtggtcggcagctgataaatcagacgggcaatgccgaggttgttatagctgacaatggtcttttcggtgtcgaataccttgccgacctcaagcgcaatctgggcttccttaaaggagcgcgcaagatccttgatgctgtctacaacggtgccgatgcccacaacgcagtgggtgtagaactcgctcgaaagcgtgtctacaatggagccggcaagcttatcgatgtcgcgcgggtcgatgttggagcgaatctccttcacgagcgcgatgtccgtctcattgatgttgatgacgaaatccttgttcttgtccgggaacagattctgcaccacgtcgtacgcggaaacatcggtctggttcgtcactttgatgagcatgcagacgcggctgacatcagagttgaagcgcagctcgcggctcttcagataaatgtcgccgggcaggatgttatcgaggataacgtttttgatgaaattgctgcggtcatacttttcatcgtaatactgcttgatgctgttcagagaaacagccagaaggccgacatattttgcggcttccgggtcgttgccggagacgaacactgcgtattccgggcgcgggcggctgccgaaggatttatatgtgtagttgccggaaacaaatgcagcctgagatgcaatgtcttccgccgttacggattccgttacttcgccgatcttgccgagctcgctgcacgcgataatcacggaggactcgtcgatgacgccgatcgtgcggtcaatggaatcacgcatctgatgaatgacgccctgaaacagtctattggacatgatttcctcttttctccgtcgcttcaaattcagtcctgcgcggttttcgacggctcccgcacagttatccattctctatgttatctatattacagaattaaaaccgatttttcaagtctttttgagtattttttttgagagttcgtaaatctgcacaaactgaaagactccgtttgctctgtaagcaatttagaccccgtatagcgactaaaaacaggagcggcacaggaaaaacgcccgtgccgcccgaaattgcgatgctctttactttaagtattcggtgaaaacatagcctgtgcggctgccgtagctcaccttgtaccactcgcttgtggtcttttccaaaaccgtcacgcttgcgccctccgggatgaccgtcagcacatttgtgtccgtgccggtgcctgcacgcaggttaagatatgccgtggtgcgcatcgtatcggaagaagcggagctgtccgtgctgccggaattgctaccgttcattgtgatatattcgctgaacatatagccgctcttgccgttcacggtcacgccgtaccagtcgctcacgcttgtgtccgtcacggtgatggccgtaccgtttgcgataacgccgagggagcggtagtttgtgccgcggccttcgcgcaggtgtacgtcttcgttcgtctgtgcggaagcggagccgtctgtgctgccggaagacgtgttgttatcggagctacccgtgtcggtcagcttgatgtattcgctgtacatgtagccgcttttgccgtttacggtcactgcataccacacgtcgcttttatccgttacggtaatggccgtgccgcccggaatcacgccgagtgaactgtaattcgtgcccttgccgctgcgcaggtgcacgccggtggtcgtctttgcggcctcgccgtttgtgcccgtgttggaattatcggagctgccggagtcggaagaatcatcctcgttcaccgtgccggtcacgtttagatattcggagaaaacgtagcccttctgaccggaagcagttgtcacggcataccattcgctgttcttcgtgcttgttacgttcacttttgtaccctctgccagcaccgtaatggtgtcatagctaaggcccgggcccttgcgcaggcgcacaccggcagtcgtcttcgcgttgaatgcggagtctgcttcggagaagctgccgtttgcggaagacggcgttttgtcggaaacaccgtcgctgccgaaggtatacgtcacaccgttgatggtgcgggtggtgttgatgacatattcgccgttttcataatagaaatagtcgccgtcaaacttataccagcctgtcgtggggtatgtaatgctgccaagcttgtgccattgcagccaaccatggcccggaatggattcgtagcgcatattaacgccccatgtgctgttgtccaccaccatgccgttgccaacgtacacgcccacgtggtcatagttcgcaatggtcacaatcaggccgtgcgtgcgcgggatcgtatcgattgggccggattccaccgcgtcgttcgcctgcgccgtaacggtgcggggatagttccagttcggctgaatgttgctgttatcatccacccagcagaagtaagaataaataagaccgctgcaatccgaggcacgcacaccgttcgagttaaagttgccgtaagcgccgtaagaatactgccaaccgtcgcgataggcctttaaagcgtgctccgcaaggccgatggatgtcagctccgcggaagccgcgctgacggtcgtgccggtgttcggcagtacagtgctgcatatcaaaataagcacggcaagcaaaaagaccgcagccgttcgggaaagctttttcacgttctgcattgttgtgttcctccgttcgtcattacattatataaacgtataagcgtgtgttcacggcggacggtccgccgcaaagatgtgggcaacagttattacaaatcggtaacattgtatcacaaagattacaaaaatgcaacccccattcgctttcacgtgcaaagaggcttatacgatctgtatacaacattgaaaacgcagaatgtttcacgctgcgaaatgttataagaccgccgggttttccacaaatcactcaccctgtgggggaaagttgagtgtatccgtaaaaaccgcggaatcccccgccgaaatgcccggaaaccttgacaaaatcccgtgaaaatgcaataatattaagtcaatagaatgtcatcaaacacactatttataaacacgcttgtgttttgataaactggagggagaaaacgtgtctaaagagcttgctaaggcttacgagccgaaagaagttgaagaccggatctatgacttctggatgaagggcaaatactttcatgccgaggtagatcccaaaaagaagccgtacaccatcgtcattccgcccccgaacatcacgggtcagctgcaccttggccatgccatggatgaaacgctgcaggatacgctcattcgttggcgcagaatgcagggctattctgctctgtggctgccgggcaccgaccacgcttccatcgcaacggaggcgaagatcgtagaggccatgcgcaaagagggcatcacaaaggaagaaatcggccgcgaaaagttcctggagcgcgcctgggcgtggaaggatcagtacggcggcaggattgtcgagcagctcaaaaagctcggctcctcctgtgactgggatcgcctgcgcttcacgatggacgagggctgcaacaaggccgtcaaccacgttttcaagaagctgtacgacaaggggctcatctaccgcggtgagcgcatcatcaactggtgcccgcactgtaagacctccatttccgacgccgaggtcgtgttcgaggaaaaggaaggctccttctggcatctgcgttacccgttgagcgacggctccggctacattgagcttgcgaccacccgcccggaaaccatgctgggcgataccgccgtggcggtgcacccggatgacgagcgctacaaggcactcgtcggcaaaacggtcattctgccgctcgtcaataaagaaatcccgatcattgccgatagctatgtggagcaggacttcggtaccggcgttgtgaagatcaccccggcacatgacccgaacgactttgaggttggtctgcgccataatctgcccgtcatcaacgtcatggacgacggcggtgtcatcaacgaaaatggtggcaaatacgccggtatgccggcgctcgaggccagaaagcagattgtcaaggatctcgacgaagtaggcttcctcattaaaattgagccgatcaagcacaacgtcggcacctgctatcgctgcggcaccgttgtggagccgcgcgtttccacgcagtggtttgtcaaaatggagcccctcgcaaagccggccatcgatgccgttaaggacggcgacatccgcttcattccggagcgcatggataaggtctattataattggatggagaacatcaaggactggtgtatctcccgtcagctgtggtggggtcaccagattccggcgtggtactgcgagtgcggcgagaccatcgtctccgaggctgtgcctaccgtctgcccgaaatgcggcggcacacacctgacccgcgaccccgatacgcttgatacgtggttctcctccgcgctgtggccgttctccacgctcggctggccggataacaccgaagagcttaaatatttctacccgacgaacacccttgtcacgggttatgacatcatcttcttctgggtggcacgcatgatcttctcgggtcttgagcacatgggcgaagtgccgttcaacacggtgttcttccacggcctcatccgcgacgcacagggcagaaagatgagtaagtctctcggcaacggtgtcgatccgctcgatgtcatcagcgtttacggcgcagatgccctgcgctttacgctcgttacgggcaacagccccggaaacgacctgcgtttctccgaggaaaaggtcagcgcttccagaaactttgccaataagatctggaacgccgcacgctttatccttatgaatatcaaaggcaaggacatcgactgcgccctgccgaaaaaactctatacaagcgataagtggatcttaaaccgcttcaataacgtcacggcagccgtcaccgaaaacctcgagaagttcgagctcggcatggcggtcagcaagctctatgacttcatctgggacgatttctgcgattggtacatcgaacttgcaaagatccgcatgaacggcgcggacgaagagagcgcagacagcgcccgccgtgtcctcgtctggacgatgagcaacaccttaaagctcctgcacccgtttatgccgtacatcacggaagaaatttggcagacgctgccgcatgacggtgaagcccttatcgtcgcaaagtggccggagtacgacgaagccctctccttcccgcaggaagcaaagaacctcgaaaacgttatggcgctcatccgtgccatccgcacccgccgcaatgagatgaatgtgccgccgtcgaagaaagcgcacatctacatcgataccgcgcatccggcaccgtatgaggaagcgagcgaattcattgcacgcctcgcttacggctccaaggtcgagatcggcatgggctttgacgtacaaggtgccgtaacggctgtgaccgacgacgcaaaggctctgttgccgatggatgatcttgtcgataaggcggcggagaccgcacgtctcaacaaggagcttgcaaacgcacagaagcagctcgataccgtcaaggcgaagcttgcaaatgaaaaattcacctccaaagcgccgcaaaatgtcatcgacggcgtaaaggcaaacggtgaaaagctggaagcaaagatcaaactgatcctcgaaacattggagagctatcaataatgacctacgaagaagcactgcaaaagatcaattcccggctgcgcttcggcatcaagccggggctggagcgcattgaagcgctctgcaaaaagctcggcgatccgcagaagaagccgcgttttgtccacgtagccggcacgaatggcaagggcaccacctgcacgcttatcgcgagcgtgcttacggcggcaggctatcgcacgggcctctacacgtccccgtatgtgcttgatttccgcgagcgctttcgcatcgacggtgaaatgatccccgaggcggagctcatcgaagaagtaaagcgcgtgtcgcccattgcggatgagctcgaagccaaaggcgagacgatcacggagttcgagttcatcaccgcgctcgcgttcgattggttcgcgcagcgagactgcgattttgtcgtgctcgaggtcggtcttggcggccgatttgacgcgacgaatgtcatcgatacgccggaagctgcggccattgcgtccatttcacttgaccacacggcgattttaggcgatacctacgcgaagatcgcgttcgagaaagcgggcatcatcaaaaagggcggcgacgtcgtgctgtaccccgtgcaggatccgtccgtgttcgagaccatcgaatcggcgtgcaacgagcgcggcgcacacctgcatattccggatgaaaagaacatgaaggtaaacggcacggcgcttacgggcaccgcgctcacgtggcgcggcctgccgcttacgttgccgtttacgggcgcgcatcaggtgcacaacgccgccacggcgcttaccgtgctcgacgttctgcgcgaaaagcacgcaaacatcaccgatgaggcgctgcaaaagggatttgcctcggcgtatatcccggcgcgcatggagattttatcccaaaagccgctcgtgcttttagatggcggccacaaccccggctgtgcctctgcgttgcatgaagtgctcaaaacacatctttccggccgtcatatcacagccattatgggcatgatggcggataaggacagcatgcgctatctggagctgaccgcgccgcactttgagagaattatcacggtgcggccgcaaaacccgcgctctttatcggcggaagccctcgcggacgaagcaaagcacttctgcaaagacgtgcagcctgcgcagagcatgaaagacgcgatagagaaagcgaccgtttcaggcgacgaagtgctcgtcatctgcggttcattcttcttagcatctgaaattcgcgacctcgccatcgaaaaatacaaggcgtaacacaaatttaatctgccgacacgctgcggcaaaaaatacggacaggttcctttagaattttctaaggagcctgtcctttttgttattatttaaatttcaaacggacatttcgggccttaaaggagcgaatacgatgaatttgcgaattgaattaaaaggcggtgcgatgacggcctccatgcgcggcgagcttgaccaccacactgccggtgaaatgcgggagcagatcgacagtacagcgaaaaaagtgcgcccgcaaaagctgattttagattttaaagaggtaccgtttatggattcctccggcatcgggctgattctcggccgtgtccgcacggcggcgctgtggggcgggcgcgtcaccgtacgcggattgtcaccgcagttaaagaaaatggcggagctttccggcatctccgcgctcgcggtgctggaagacgccgggaaaggagcgaaaacatgaaacagatcatcaaccgcatggagctgcgcttcccgtccggctccgtcaacgaaagctttgcgcgcggcgcggtctccgcgttcgtcctgtgccttgaccccctcgtcacagacttaaacgatttaaagaccgccgtcagcgaagccgtgacgaacgccatcgtccacggctaccgcgataccatcggcaccgtgtacataacggctgtaatctacgcggacggcaccgtgcaggtcaaggtgcgcgaccgcggctgcggcattccggatatcgaaaaagccatggagccgctgtttaccaccgggggagaggagcgtgcggggctcggctttgccgtgatgcaaagcttctgcgacagcgtgcgtgtcatttcaaagcctcaaaaaggcaccaccgtgacgctcacaaaacggtttgagcgcaagccgaatggagaataaagactttgccgagcgcaacgtggggcttgtgcgcgcgcttgtgccgcgttttctcgggcgcggcatcgaatacgacgacctctttcaggcgggctgcgaggggctcatcaaagccgccgcacactttgaccccgaccgcggctataagttttccacatacgccgtgcctgtcattttaggcgaaatgcgccgcctgttccgcgagggcggcacggtaaaggtctcgcgcggattgaaagagctttccatgaaagcggtgcgcctatccgaacagatcgaaacggagaccggcaaagcgccgagtgtgtccattcttgcggaaaagctcggtgttcccgaagaaaagtgcgcggaagccttaaacgccgccgcacagcccgtctccctcaccggtgacgacgaaaacagcgagacggacattcccgtcgacgcaccggaagaaaaaatcaccgatcacctcgccttgcagcaaatactaaaggcgctgcccgaggaggaccagcgccttatttactatcgctattttaaaaatcagacccaaacggaaacggccaaaaggctcggcaccacacaggtgcaaatcagtcgtcgcgagaaaaaattactcctccgtctgcgtggtctgctgttgtgaggttgtttccgcgcccgccaaaacggtgcgcgtgttctttaagaagttgtagtcgctcagcagcatggcgtaatacgccaaattcacaacgccctggcgctcccaacggtggcattcgcgcagaacgccctcgcgctgaaagccggatttctccaaaatgcgctgcttgtcaatgtccgcatctaagcaaatggactgcacgcggttcacgcgtgccatctcaaacaggtagcggcacagcgcgcccatggcttctgccggatattccgtgcccacacagcggcggccgaacaaaaagcgcagttgcaccatgttcatgccctcgtccgcaccgccgatctcgatccacccgatgaggtgtgcgaggtcggtgtttgcatatacgccgagcgttacggtgcgctttgcggcaaactgcgcgtttgcatcctgaattttatattccgcctgcacgcgctccttggcgggcgcttcatattcgtagcggtacagttcttcgtcctgcataatctcccacagcgcgtcgccgtccgcaaagccaaggcggctcagcgtcacgtttgcactggtgagaaacgggcagctctcaaaaagcaattcggttctcatttcggtttctcccatccctcatagtatcgtaagcggaagcggcgtcttaaaccagtgccggcagctccgcaatatcgtaaatcttcggcacgttttccacattgccaaagccgtaagcggcgaaaataaacggcacgcccgcctgtgtcgcggagttataatcccacaccgtgtcgcccacgtataccggggctttcaagtgattgtgctccacgaccagcgcgatgttgtcggccttcggcttacctgtgctgcccatgcactcatagtccgtaaaatactgcgccatgttgtgcgccttcaaaaacgcctgaatatacccgttgtcgcagttgctcacaatgcacagcgtgtgcgtttcggaaagctttttcagtgtctcgtgcatatgcgggtatagctttgcgccgtgctccgcaagatattcacattccagcttgaaatcctcgttaaagatctgcattcggcgctcgtaagaaaggtacgggaacagcttctccgccagatcgtccataccaaggcccatcacgcctgcgtattcctcttttgtgggcaggtgcgtcacgtccggctgtgtctttaaatactcgagcagcaccagatgtccttcctccacggcgtcccacagggtgccgtccaggtcaaaaataatgccatcgtatttcatcggaaatctttctcctttatatataatagtataggggagagggcgctcagccctccaaatggttcagatcatacggcgtttgctgataaacgtagtagttcagccagtttgcaacaagcagatgtgcgttgctgcgccacgtaaacgggggtgtcttctggtcgtcgtcatccgggaagtaattgtacggcactttggggttcaaacccttattgatgtcgcggaagtattccttcgccagcgtgtcgcggtcatattccgcgtggcccgtcacaaagaacttgcgcccgctcttttcggcgacgatatgcacgcccgcaaggtcggagagcgaaagtacaatgagctcgtcgtgctttttgatgtcgtcaaggtaaacctccgtgtagcgcgagtgcggcgcaaagtaattatcgtcaaagccgcgcatcaaggggtgatacgggttcagcacatggtgattgtaaatgccggagagcttttccttcatcaaatgcttctgaatgccataatggtagtaaagaccggcctgcgcgccccagcagatatagagaacggaatacacatgcgttttgctccattccataatggcacacatttcgtcccagtagtccacttcctcaaacggcatcttttccaccggcgcgcccgtgatgatgaggccgtcaaagcgctggtccttcacgtcgttaaaggtcttatagaatgtattcagatgataagagctcgtgttgcggctgacatgcgatgccatgtgcagcaactcaacgtccacctgcagcggcgtgttgcccagcaaacgcaaaagctgcgtctcggtctcgatcttcgtcggcatcaaattaagtatcgcaatctttaaggggcgaatgtcctgcaaagcggcgcgctcgtgcgtcatcacaaagatgttttcggactccaaaacctcaatggcgggcaaatccgcctgtatacgaataggcattgctttttttacctccgtcatatatactattatatagggcacaggggcccgatacgtttcagtatagcatactttgtccctctgtaaaagagagtaaaagcggtttgaagcgatttttttcaaagttttttcaaaagtttttcggacttttttcagaaaaaaccgaaaaacgcaaaagaaaaggcgaaagcggcggttttgtttacactgtatgttgttgattttgcgcaagcaaaacacaatatatgtacacaagaaagaaaatcgaaaaaaacttaaaaaaaacgaaaaaaagtgttgacaaaaagggctccccgtggtattatatacaagcgctcgagagagacggcaaaaaaccgaaagcgaaaagctgaaaggaaagccgcttgaaagagagcacaggaccttgaaaattaaacaacgagagaaagaatggaacctgtaatttctttgagaaactcaaagaaacttacgagaaacagaactcaacaaatctgtgacgaacgtcagaacgacgttatgagcgaattgaagctctgaaaaagatttgaacgcgaaagcgtttagatacaattttttagagagtttgatcctggctcaggacgaacgctggcggcgtgcctaacacatgcaagtcgaacggagttgaaagaagcttgcttttttcaactcagtggcggacgggtgagtaacgcgtgagtaacctgcctttcagagggggataacgttctgaaaagaacgctaataccgcataagattgtagcttcgcatggagcagcaatcaaaggagcaatccgctgaaagatggactcgcgtccgattagatagttggcggggtaacggcccaccaagtcgacgatcggtagccggactgagaggttgatcggccacattgggactgagacacggcccagactcctacgggaggcagcagtgagggatattgggcaatgggggaaaccctgacccagcaacgccgcgtgagggatgacggttttcggattgtaaacctctgtcctctgtgaagatagtgacggtagcagaggaggaagctccggctaactacgtgccagcagccgcggtaatacgtagggagcaagcgttgtccggatttactgggtgtaaagggtgcgtaggcggattggcaagtcagaagtgaaatccatgggcttaacccatgaactgcttttgaaactgttagtcttgagtgaagtagaggtaggcggaattcccggtgtagcggtgaaatgcgtagagatcgggaggaacaccagtggcgaaggcggcctactgggctttaactgacgctgaggcacgaaagtgtgggtagcaaacaggattagataccctggtagtccacactgtaaacgatgattactaggtgtggggggtctaaccccctccgtgccggagttaacacaataagtaatccacctggggagtacgaccgcaaggttgaaactcaaaggaattgacgggggcccgcacaagcagtggagtatgtggtttaattcgacgcaacgcgaagaaccttaccaggtcttgacatccaactaacgaagcagagatgcgttaggtgcccttcggggaaagttgagacaggtggtgcatggttgtcgtcagctcgtgtcgtgagatgttgggttaagtcccgcaacgagcgcaacccttgtgattagttgctacgcaagagcactctaatcagactgccgttgacaaaacggaggaaggtggggacgacgtcaaatcatcatgccctttatgacctgggctacacacgtactacaatggtcgttaacagagggaagcaataccgcgaggtggagcaaaaccctaaaaacggtctcagttcagattgtaggctgcaactcgcctacatgaagttggaattgctagtaatcgcggatcagcatgccgcggtgaatacgttcccgggccttgtacacaccgcccgtcacaccatgggagccggtaatacccgaagtcagtagtttaaccgtaaggagaacgctgccgaaggtaggattggcgactggggtgaagtcgtaacaaggtagccgtatcggaaggtgcggctggatcacctcctttctatggagaatcaagaacagctaaggttgttctttaacatcctaggttagattacagggaaaacttttaatcgttgtttaattttgagggtcttgatcctcaagaacggggcatcttcgttctgaaaagaatatgggggtgtagctcagctgggagagcacctgctttgcaagcagggggtcatcggttcgatcccgttcatctccaccaagggccgaaaggttcgaacaaccggtggtttaactagatatgggcttatagctcagccggttagagcgcacgcctgataagcgtgaggtcggtggttcgagtccacttaagcccaccaagcggagcaatccgcaaaatgtaccttgaaaactgaataaagcgaagcagataaaaatgcgagaaaactgttatttactagagaattatttaaaaggtctaacgatccaaataattgtttagggtaataactgcaatttcaaagaagcgaaaaaagtttaagtttattctttgcaaagagaaataactacaaaactcatttctaattccaagaagagaacacatggtcaagctacaaagagcgcaaggggaatgccttggcactgggagccgatgaaggacgcgactaactgcgataagctacggggagccgtaagtaggcattgatccgtagatttccgaatggagcaatccgattaaagtcatgtttaatcatcatacactgaatacataggtgtatgaggggaaccgcctgaactgaaacatctaagtagggcgaggaagagaaatcaaccgagattccgctagtagtggcgagcgaacgcggaggaggccaaaccaagagtagtaatacttttggggtttggacagcaatgtgtaggattaagtttagcagaatggcatgggaaggccaacgaaacagtgtgagagtcacgtatgcaaaaagcgaaatccgctagctgtatccagagtaccgccggacacgtgaaacccggtgggaatatggggggaccaccctccaagcctaaatactacccagtgaccgatagtgtatagtactgtgaaggaaaggtgaaaaggaccccgggaggggagtgaaaaagaacctgaaaccttgtgcttacaagcaccgagagcccatcaacgggtgatcgggtaccttttgtagaatggtccggcgagtgaatgtaactggcgaggttaaggacttaaggtccggagccgtagcgagagcgagtctgaatagggcgtatgaagtcagttgtattcgacccgaaaccgggtgacctacccatgtccaggttgaagtggaggtaaaactccatggaggaccgaaccgactcccgttgaaatggtagcggatgaggtgtgggtagcggagaaattccaatcgaacccggagatagctggttctctccgaaatagttttaggactagcctcgtattagattaccggaggtaaagcactgaatgagctaggggccgagaggttactgaactctatcaaactcagaatgccggataattgatgtacgggagtcagacagtgtgagataagtttcattgtcaaaagggaaacagcccagacccacagctaaggtcccaaagtacggttaagtggaaaaggatgtggggttgcacagacaaccaggatgttggcttagaagcagccactcattaaaagagtgcgtaatagctcactggtcgagtgaccctgcgccgaaaatttaacggggctaaatcgtacaccgaagcttgggatgcagtaatgcatggtaggagagcgtcgtataaggggtgaagtcagagcgtaagcgctggtggactttatacgagtgagaatgccggaatgagtagcgagaaatatgtgagaatcatattggccgaaagtctaaggtttttggaggaaggttcgtccgctccaagtaagccgggagctaaggtgaggccgaaaggcgtagccgatgcacatacggtagatattccgtagccgccaaaagatttaagtaagaggacaccttgaaaggacttgacccgggcgatggttgccccgggcgaaagggaccgaaatttagtagggaagcaagtttggacgagggcgagaaaagtcttatgtatatcttcggcgcccgtaccgcaaaccgacacaggtagataggaagagaattctaaggccaacgggagaagggtagttaaggaactcggcaaattgaccccgtaacttaggaataaggggtgccacagcgatgtggtcgcagagaataggcccaggcaactgtttatcaaaaacacaggtctctgccaaatcgaaagatgaagtataggggctgacacctgcccggtgctggaaggttaagaggagatgtgcaagcattgaattgaagccccagtaaacggcggccgtaactataacggtcctaaggtagcgaaattccttgtcgggtaagttccgacccgcacgaatggtgtaatgatctgggcactgtctcaattacccgcccggcgaaattgtagtaccggtgaagatgccggttacccgcgacaagacggaaagaccccatggagctttactgtagcttaatattgggtttcgataatttatgtataggataggcgggagactaggaaaccgtggcgccagccacggcggagtcgacgttggaataccgctcttaagttattggaattctaacctgcggccatgaatctggccgggggacattgttaggtgggcagtttgactggggcggtcgcctccaaaaaggtaacggaggcgctcaaaggttggctcagcatggttggaaaccatgccttagagtgtaaacgcgaaagccagcctaactgcgaggatgacggtccgagcagtaacgaaagttggagttagtgatccggcggtatgagagtggaattgccgtcgctcaacggataaaagctaccctggggataacaggctgatctcccccaagagtccacatcgacggggaggtttggcacctcgatgtcggctcatcacatcctggggctgtattcggtcccaagggttcggctgttcgccgattaaagtggtacgcgagctgggttcagaacgtcgtgagacagttcggtccctatctgtcgtgggcgcaggatatttgaggagagctgtccttagtacgagaggaccgggatggacgcacctctggcgcaccagttgtcacgccagtggcacagctgggcaactatgtgcggaacggataaacgctgaaagcatctaagcgtgaagccgactccaagattagatatcccatagcgtaagctagtaagaccccttgtagactacaaggttgataggctgcatgtgtaagcacggtaacgtgttcagcttggcagtactaataggtcgagggcttgaccataatccttcttggttcaagattgcgctttcttctcccattctactcttgcttctccctttattcagttttcagggtatatgcaccattagctcagttggtagagcacctgactcttaatcagggtgtcccgggttcgagtccctgatggtgcaccagaagctgaccaagagccacaactcttggtttttgtggcccgttggtcaagcggttaagacagcggcctctcacgccgttaacgtgggttcgattcccgcacgggtcaccaaaatattcctccttagctcagttggtagagcatgcggctgttaaccgcagggtcgttggttcgagtccaacagggggagccagataaaagcacttagcgtattgctgagtgctttttattttttatatggttcaaaatcatttgtttttttcaaaaaatgagttatacttaagaatgtaaggtcgccttagggcgaaattgattttaatggacataggaggtatttctatggcaaacaagtatacaggcaccaaaaccgagaaaaatctgcaagaggccttctccggcgagtcgcaggcgagaaataagtacacttttttcgcatctgtcgcgaaaaaagagggctacgagcagatagctgcactcttcctgaagacagccgataacgaaaaagaacacgcaaaaatgtggttcaaggagctcatgggcatcggcgatacaaaagcaaatctcggggccgctgcggacggcgaaaactacgagtggaccgatatgtatgagggttttgcaaaaaccgccgaagaggaaggtttcccggagcttgccgcaaaattcagaatggtcggcgagatcgaaaagcaccacgaagagcgctaccgtgcgctgctaaaaaatttagaaactgcacatgtttttgaaaagagcgaggtaaaagtgtgggagtgccgcaactgcggtcatatctgcgtcggcgtcaaagcgccggaggtgtgtccggtctgcaaccatccgcagagctattttgaggtccacgcggaaaattattaagcaaactctatgaacggctgctcggttctaaattgggcggtcgtttttgtgtcgctttgtacagtgctttcggctttttccacaaaccaaacgccgaaagactggcttgacaagcccctttttcggctctataatgtcgataaaagggaggagttttcatgagaacatccacacagatcgaaactgcgtccgttctggtcggcgaagaaaaagccgtggaatacgtcgcaaaagccgggtttgacgcctgggatttttccatgtttgccatgtgcgattacgattggcgactcggcgcagtccgccccacaacacatccgcttgccggggaaaattatctcgcgtttgcgcgcaagctgaagcagatcggtcttgataacggcatcacctgcaaccagtcgcacgcgccgttcccgacctcctgcccggagattcgctcgtatttcaagcgcgcgattgaatgcacggcagaagccggcggcaagatctgcatcattcacccggataacgacagatccgccgcagaaaatgccgaaatgtaccttgaactgttgccgtttgcgaaggactgcggcgtgaagatcgccacggaaaacatgtggaactgggatgatgcgaaagacgagtcctgctttgcagcatgcgccacttcagagagcttcatcgagcatatcgacgccgtaaatgacccgtatctcgtcgcatgcctcgacatcggccacgcggaaatgcgcggctccggttcaggcgcggcgaacatgatccgtgcgctgggccaccgcctgcaggcgcttcacattcacgataacgaccgttggcacgattcccaccagatcccgttctccatgtccattgatttcgcgcccatcgccgccgcgctcaaagagatcggttacaaaggctggttcacgctggaggccgattattacctcaaagaaaagttcaacgcggaaaacgtgtttgcgggcatgaaagacctgcacaccgccgccgttcgctttgaaaaattatttgacgaagcctgaaattaaaatttcccgtatcttgaagtcaaaaaccgaggtacgggaaaatttttcattcccaaaaaccatgtttatttcctgcggcattttggcgctcgcgtttcttctgttgtttttaacgcccaccgttgcgaacgatacgcacgaatagcttaactgtgcagttccatagcttgtcaaaatcttgacaaaagcggaagaacagggtagaataaaaggaccgaaatatcctgtttgatgcggcggaatagcttaccgcacaaacgaaaaaagacattatttttgagaggaagtatcagcaatgagcgaaaattgtacgcacgactgctccagctgcggcgaggaatgtccttcccgccagaatccggaaagctttcttgcgcccatgaataagatgagcaatgtcaaaaaggtcatcggcgttgtcagcggcaaaggcggcgtaggtaaaagccttgtcacctctatgctggctgttaccatgcagcgccgcggctttaaaaccgccattctcgacgccgacatcaccggcccgtctatcccgaagtgcttcggcatccacgaaaaggccatgggcagcgatgacggcctgttcccggtcaacacaaagaccggcatcgagaccatgagcatcaacgagcttctgccggatgagacctccccggtcgtctggcgcggcccggtcatcgccggtgtcatcaagcagttctggagcgacgtcatctggaatgaagtcgattacatgtttgttgacctgccccccggaaccggcgatgcaccgctcacggtgttccagtccatcccgctcgacggcatcatcatcgttacctccccgcaggagctcgtctccatgatcgtctccaaagcggtcgaaatggcaaaaatgatgaacgtgcccgtgctcggtctcatcgaaaattacagctatgtcaagtgcccgtgctgcggcgagccgttcaaggtctacggcgaaagccacatcgacgaggtcgcggcaaagtacgacctcaaggtgctcgataagctcccgcttgacccgcagattgcctccctgtgcgatcgcggtgccatcgagctcatgggtgacggccttctcgataacgccgctgacgccgtagaagccgcacatcgcgcgtaaagtgtcattgatattttcattttatccaaataaggtagttcaaagataaaccgttaaatgtttatcggagggcgacccgttcacacgaaacagaaagccggataaaatgcgggctgcaatgcctgtatttatccggtttttattatttatttcacgttttgagggagtacgttatgcgcgaaatgcgtgagaccgcaaaagtgtgaagctttttgaaatttttgaaaaaacaattgacattgaaatgaaaaccagataagataagaatatatctaaaaacaagttttgtcttttcagatatacctcatataatacagagaaaatataaaagcgatgacgaagacagtgcgggctttcccgtttcagagagtcggcggcgggtgtaagccgatacgaaaagccctgtcacaatcccttccgagctgaaagccccaaagtgaacccgagtagggctttccgcgccatgctgcgtcagtgcatagggcttcatgggagcccgtgagtggccttttcaggcaatttgagtggtaccgcggatcaactccgtctcaaagcgatttgagacggagttttttgcatgaaaaacaccaaaactatcgatatagccataccaaaacgaaaggaatgaagaaattggcaaacgaagcacaaacccccgtaacggaaaaaacagacctgaaagcacagctcgcagaggtggcggagcgcattcgcaccatgcgcgagatcatcggcctttccgaagaagaaatggcgcagcgcaccggcgtcacgctggaggaataccgcagctttgaaagcggcgagcatgatttcagcttcacgtttatttttaaatgtgcagaacgcttcggtatcgaccccacagacctcatcaagggcacaagcccgcgtctttccacatataccgtcacccgccgcggcgagggcctgcccattacgcgccgtcagggttttaagtatttaaatcttgccccgctctttaagggcaaaacggcagagcccttttttgtcaccatgccgtataacgaggcggagcagaaggttgcgatcaagctttccacccatcaggggcaggaaatggacatcgtcatcaagggcaaaatgcgcgtgcagatcggctcgcacatcgaagaactcggcgagggtgattccatttactacaacagcggcacgccccacggtatgatcgccgtcggtggcgaggaatgtaccttatacgccgttgtcatgcgcccgcagaaggagaaaaagcccgaaaaggacacgttcgaggcgctcataaaggccaagcgggaccgtgccgaccgcgaaacggtcgcaagcccgtttgtgcacaccgagcttgacgaaaacggcatcttaaaatccattgatttcatgaacgaagaaaagttcaacttcgcgttcgacatcgtcgataaaatggcggaaaaagagccggataagcttgcgatgctctgggtctccaagcaccacgaggaaaagcgcttcacgtttaatgatatgaagcgcatgtcgaataagacggcaaactacttcaagtccctcggcattaagcgcggcgatagagtcatgctcatcttaaagcgccactaccagttctggttcgccattttggcgctgcataagctcggcgccgtcgtcatcccggcaacgaaccttttaatggagcacgacctcgattaccgcttcaaggccgcaggcgtgcgcgcgctcgtctgcacgccggacggtcaggtcgcagatgaagctttgcgcgccgccgaaagctgcggcaccgttgaatttttgatgatggcaaacggcgcacgcgagggttggctcgatttcgacgccgaggttgaaaagcagagcgacgtgtttgagcgtacagaggacaccgcctgcggcagtgatcccatgctcatgttcttcacctccggcaccacgggctacccgaagatcgcagaacacaactataaatacgcactcggacactacatcaccgccaagtactggcacaacgtcaacccggagggcctgcacttcaccatttcggataccggctggggcaaggcgctgtggggcaagctctatggccagtggatgtgcgaagcgcccattttcacttatgattttgataagttcaatgcacacgacatcctgcccatgttcaagcagtacaacattaccacgttctgcgcgccgcccaccatgtaccgtttcttcatcaaggaagacctctccaaatatgacctttcctccatcgagtacagcaccacggcaggcgaagccctgaaccccgaagtctacgagcaatggaagcgcgccaccggcttttccatttatgagggcttcggccagacggagaccacgctttccatttacaacccggtcggctccgtgccgaaaagcggctccatgggcatcccgagcccgctttacgatgtcgacctcatcctgccggacggcacgcctgcgccggtcggcgaaacgggcgaaattgtcatccgtaccgataagcacacgccctgcggcctcttcatgggctattaccgcgacgaagagaagacccgcgaagcgtggagcggcggcgtatatcacaccggcgacaccgcatggcgcgatgaagacggctacttcttctatgtcggcagaacagacgatgtcatcaagtcgtccggttaccgcatcgggccgttcgagatcgaatccgtcatcatggaactgccgtatgtgctcgaatgtgccgtcaccagcgctccggaccccattcgcgggcaggtcgtcaaggcgtccatcgtgctcacaaagggcacgcagggcacagaagcgctgaaaaaagagattcagacctacgtcaagacgaacaccgcaccgtacaaatacccgcgtatcgttgagttccgcgatgagctgccgaagaccatcagcggtaaaatccgccgcgtagagctcaagggctgattttaaaccgaatagacacataagcgccgctgtatggctttttcccgtatggcggcgttttttctatgtttgtgtgttctaaattcaaattttgttcaccgtttttctcccgtatttgcgtataatgtttatgaataaatttgtgcgtaaagggtgagagaaatggataaaaatttggaatacgagccggtacgcggcgcgcacattttaatgatcgtcaaccccgtttccggccgcatcggcggcgagcataccgccgataagcttgaagcatggctgaaggaaaacggcgccgccgttgaccgctttgaaacgaccgaaacggaaaacggaagcggctacaccgcaaagctcgcagaaaacgactatgcccgcgtcgtcgtgctcggcggcgacggcacattaaacgccgtcttaaacggcatgctgcaccgcgcactgcgcacgcccatcacatatctgcccgccggtaccacaaacgattttgcccagacgctcggcattcaaaaacatcttttagatccttataagagctttacggaaacagaagaccgcctcattgatgccggcaaattcggcgacggctatttttcctatgtcgcgtcgttcggcttatttacaaagtgctcctacgccacgccgcgcaccatgaagcgccttttgggccacttcgcgtatgtcttagagggcatgaaggacctccacgcgctcgacgccacgcccctcaccgtcacggcagacggcaaatttttcgagggcacgtacattttcggcgcgttcagcaactcgctttccatcggcggcatgttgaaatacgatgaaaacagcgtcgatatgaacgacggcaagcttgagatgcttctcattcgcaagccggaaacgctccctgatctgcaccgcctcattctggcgctcaaaaacaacgatttttcggacaagcacatcgatttcgcttccgcgagtacgttccgcctgcatgccgcagtgggctttgattggtcaatcgacggcgaatacgccgcaggcggcatcgataccgtcatccgctgtgtcaaggatgccgtgtgcatcgccgcgccgcgtgtcgaaaacggttgatttttcctgcaaaacgtgtataatagcaaaagcgatactgcctgcggactggaagaaggccgggcagtaagcctatcctatccaccatattttcggaatgcctttttaggtacgcgcgctgcgcgggaaaggaggtgcggcctgtatggcctcatcttttgaaatcaaatccaccagaccttcggtgggtgaaaccatcgtcaccatcgttcgggatcacatcgattaccgaaaacagatctttaagcttgcgggctccgacctgcgccgcacataccgtgcgtccgcactcggttggtcttgggccatcatcaagccgcttgtcacgattttcgtttactggttcgcatttgccgtcggcctgcgccgcggcggcgatatcgagggctacccgttcgtgctgtggctcatcagcggcatcgtgccgtggttttatatgagcgaaatgctcacgcttggcaccgagtgtattttgcgaaaccgctatcttgttaccaagatgaaatacccggtctccaccattccgacgtttaccagcatctccaaattttctgtgcacctcatcttgatgatgatcaccatcctcatcttcgttatcaccggcaacgaattgaccatctaccttgtgcaactgccgttttacatgctgtgcaatttcctgttcttcaccggctgggctatgtttgccgcgcccatcgccgccatcagcaccgatttctcaaacctcgtcaaatcgttcgtcacagcggtgttctggctttccggcgtgcttttccaggtcgataccatgcacaagggcctcgcgcataagcttttgatgctgaatcccgtcacgttcctgtgcaacggctaccgcaactgcttcatttaccacacgtggttctttgaccagccgaagcgccttttgtatttcgccgtctggctcgtcgtcatttacgcactcggcatctggagctaccgccgcacccgcagcgaaatggcggatgtactgtaaggagggcaaaagcatgagcgaacaaaatagcattgccatccgttttaaaaatgtctgcaaaacgtacagactgtatacaagcagccgccgtcgccttttggggctgtttttcaaaagcgtgccgcacaaaacaaagcacgccgtcgtcgatatgaacctcaccgtcgagcgcggcgaagccgtcgccattttaggacgcaacggcgcgggcaaatccaccatgcttaaaatgatcaccggcgtcacgttccccacaagcggcgaaatttacgtcaacggcatcgtcagcgcgcttctggagctcacaagcggctttgaccaggaatttaccggccgcgaaaacatttacctcaagggccgcattttgggccttaacgatgaagacatcgcaaagctcgagcctgccatcattgattttgcagagctcgaagaatacattgaccagcctgtgcgcacgtattccagcggtatgaaagcgcgcctcggtttttccatctgcgtcaacatcaacccggaaatcctcatcgtcgatgaggcgctgtccgtcggcgaccgcgcgttccgcgataagtgcaccaaaaaggtgaaggagatcatgcagggcgacatcacgcttctgttcgtcacccattcgccggagattgccaaagcgttctgcacccgcggtatcgtgatgaaaaacggaaagatcgtgtttgacggcaccatcgatgaagccatcgactactacgccacaaaatactaaactaccccttcgattttgaaaccggaaaggaaatttaccatgagaaaacccaaaaagcttacggcgctcttgctcgcgctcacactgcttttcgcctgcgccgcctgcggcagcggaaacagcacaacagacagcggcaaaaccatctcgggcacgctgccggagattatagaccgcctgtatgacaccgtagatgtcgatgacgagcagcgcgattttctcaaaaacagcgtcggcacggtcgagattccgaaagaccagtctgcgtattacttcggcgtcgaaaacctcgattttgaagaagccgtcgcgagcgagccgctcatcaacgccatcgcgttttccgtttgcctcatgcgtgtcaaggacggtaccgacatcgacgagctgaaagcggagatccgccgcagcgcgaaccccgccaagtggatctgcgtggatgtcaacccgaacgacgtgcgcgtggaaagcgtcggcgaccttgtcctgctcatcatggcggacgattccgaaaaatacagcgaagcattctacgccctcgccgagtaaaaagcaaaacttgacgaaaacgccaaaaatcgctatgatgaatataaacgcggcgtgatgccgtgtgacgaaaggaagttatatcatgctgaagaaaatcgatacaaagaaagcccccgcagccatcggcccgtattcgcaggccatcgtttgcggcaatatgctcttcacctccggtcagattccgatcgaccccgcaacgggcgacatccacggtgcagacatcaccgagcaggcagagcaggtcatgaagaacctcgccgccgtcctcgaagaagccggtaccacgtttgaaaacgccgtgaagaccacctgcttcctcgccgatatgggcgatttcgccgcgttcaacgccgtctacggcaagtatttcaccgaaaagccggcacgctcctgcgttgccgtcaagaccctgccgaagaacgtcctcgtcgaagtggaagtcatcgcagcgctttaatttccgcaaaacaaaaggcatacggtaagcgaaaaacgctttgccgtatgccttttggcatataaaaagcgccgtacgggttcccgtacggcgccgaaaaatcactttttcttgctcgttttaaacttcgggaacagcggctttttaccctgttcctttttctttgccgcgcgttccaaaacgggggcgcacagcgggcggcccttagaataccccgccgcgtagtgagagctttccagatatgggtatttgcccggttctaaatcagcgtttgaaagcccgcgcgccgcaaggcggttcgttgtcacgcggcgcatcaccgtgtatagaaccgctgcaatcggtgtgccgagaataatgcccaaaatgccgaacaaattgctgaagatcgtcacggcggtcatcacccacacgcccggcagaccaatggtcgagcccacgaccttcgggtaaatgaggttgccctcaaactgctgaaggcagatgaagaagatgacgaaccatacagcatccatggggtttacgatcagcagcaaaaacgcgccgatgccgcagccgatgtacgcgccgagaatcggtattaacgcagtgatcgtcacaatgcacgagatgagcagcgcgtagtcaaacccgataagcgacatgcagatgaagcacaggcagcctaaaatgacacactccgtcagctggccgcgcacaaaggaagaaaacacgttgttcgaggttaccgcaatgtctgccagcgttgccaccacctttttcggcagcagggaataggagacacgctttaaggaaagcagcaggctctccttgctcgtcaggaagtacgcggagaagataacggagagcacaaacgtgaaaatgccgctcgccacattcacggtcacgtttacaagcgagctgaaaaagttcgtcgtaaactccgttgcgcccgataaaatcgaagaccagttgaagttattcaacgaatccaccatcgtggaaaaatcgaggtcaaactgcttggaaagctcgtctgcccatttggcaatctggtctgcatacaccggaatattcacgcgtgccgtctcgccgatgagttctaaagacttgaaaatctccggcacgacatacagcgtgatggcgaggaggatgagcacgatcaccgcataggaaagcgccacgcataccgggcgcttcagctttttccacaccttgttgtcactgcgtgtgagccttccgaacaccgtgttctcaaacagattcaaaaacacatttaaaatgtacgcgataaaaaggcccagaataaacgagctcaccgcgttaaagagcacgccgcccaccttcgagaccgcatcgaacttgaacagtacgaaaatcagccccaccgcaaaggcggcaatggcaatgccgggctttacatagtcccacggggtgtattcccgcatcggtttcttttctgcagaatggttttctttttccacaatgaccctccggtttccaatacacgttaaggcgataccgcaggcttcgccctaaaaatgacccgccgcacacggaaatgcgcgcggcgggtgctcagagttttttatttaagaattaaaataagaattaaaatcagaacgtcgcctttgcgccagtctcaaatgccttgtaagcaccgtccatcaaacgggtcagcatcacagcctcgtcaatcgtgaacggagacggcttgccgtttacaacagcatcgatccactggtcgatcggcagcggctccttttccggcagctcaaggtctacccacttgccttcggtcgccttgccaccccactgtacgctgtcgccgtgtaccatcacagcgccgtccgtgccgctcacttccagcgtgtacgggttgcactcggagacaaagccggtctcggaaacgccgatcttgccgtctgcaaactcgatgacggaaaccgcattatcctcaacgccgcggttcgtcacctgcgtgaacgtggaggtaatggatttcggctctcccagcagccagtaaagcgtgtacatcgggtgtgagccaaggtctatcattgcgccgccgccgcactgtgctttatcgtagaaatgcgggggaagccagtttgcggagctgccgttgtgtacgttgcgcacgcgtgcgtaggtcacacggcccaacttgccgctgtccatcaaagcttttaccgcgcgcagcgtcgggaacgtgcggtgcgggtaagagatcgtaaataccttgccggaagccttcacagcctcggcgaccttctctgcgtccttggggtcgatggtgagcaccttctcggtgaagatgttcttcttcgccgccgtcaccttcatcatgatctccgggtggtcgcaggtcgcagtgcagatgaccacgctgtcaatgctctcgtcgccgagtacagcgtcaaggtttgcgttgaacggcaggttcatttcatcggcgaacttcttgccgcgctctgcgtcgttgtcccaaactacagcgacttccgcgttcgggttgttcagtacacccgtggtgtactctttggtgtggacgtgccaggtgcctaaaattgcaactttcatagttttcaaactccttgccctaatcaggtcttttgtttaaactgcttatggcagcgctggcaggtgacaagaattttaccgcgtccgcgcggtgcgcgcagctgctggcgacagcccggacagcggaagtacttgtattgcttgcgctcgcgaaaagccgttttcttaattctaaaccatttttgcaccggtgtccatacctttaagaaagaataatattctttttgccgcgcggggatgttgcgcgagaacatacggaacagcgcatagatataaagcgcgtaagaaataattgcgagcggccagaaccagaaaatgcgcgaaaggaacatcacgataataccgaggatcatcaaaacaaggttcagttcgtccgtgccgtaccggccgtacataaatcttcttaatttttcaagaaacaaataaaaacacttccttagaaatgagggtatagagataaagttaaaaataagatttcacagttaaaagtataatgcgcggaaaactttttttcaagaaaaccgagacttctttcacactaagtttacactttgttcttagggtaacactaaggtaacaaattgtgcataaatctctgcggtttcagaagcagaacatcacaggacacaagcggacatctttttcaaaacgcgctttttccggtatttaccgcttgacaaatcagaacgcatgttctataataaggacatagagaacgcatgttcgcaacgcgtcaaaaggaggcaaaagccgtggatcgggtcattctgcacatcgatatgaataacttttatgcctctgtggagacgctttatgacccgtcgctgaaagatattcccatggcggtcggcggcgataaagagcgtcgccacggcatcgtcctcgcgaaaaatatgctcgcgaaggccaaaggcgtcaaaacggcggaagccctgtgggaagcggagcgcaaatgccccggcatcaagtttgtcccgccgcattttgagcgctacgcaaagtattcgcgccttgcaaaggagatctacatgcagtacaccgacatggtggaaagcttcggcttagacgagtgctggctcgacgtgaccggcagccgccgcttgttcggcagcggccgcgagattgcggaggaaattcgcgcgcgcgtcaaagatgagctcgggctcacggtgtcaatcggcgtgtcgttcaacaaaattttcgcaaagctcggcagcgactataaaaagccggatgccgtaacggagttcacgcgcgagaattttaaagagctcgtgtggccgcttccggcggcagacctgctgttcgtcggcaaatcgacgcaggaagcgctcaaaaaatacggcatctacaccatcggcgacgccgcaaaggccgaccggaagctgttaaaaaggctattcggcaaggcgggcgagcaattaagtatatacgcaaacggcgaagacaggtcgcccgtgcgccgtgtgaacgagcacgaggaggtcaaaagcatcggtaacagcaccaccgccgtgcacgacctaaaagacgacggcgaaattcgcgcagagctctacatgctctccgaaagcgttgcacaaagattgcgcgaaaagggcctttgcggctacaacgtgcagctttccgtgcgcaaatataacctcgagacttatcagcgccagaagatgctggacaccgccgtggcggattccaaaagcattttcgacgcagcctacggccttttccgcgcccaccacacgggtgaatccatccgcagcatcggcgtgcgcgtgtcgtcgctcgtgccgctcggcatgtcgcagtgctcgctgtttgaagatgccgcgcgcggacaaaaggcccaaaagctcgaaacgacggtcgattttctgcgctgcaaatacggtggcgacatcattgatcgcggcatcaaggtgatgcacaaagacctctttcagtccgccgcggaaaaccgccgcacacacgtcgaaaacccgttcaagggcgtcgcactttaagatagggagaacagcatgaacacacaaatggacaccatggaaaagctgcgcattttatcggatgccgcaaaatatgacgcggcgtgcacctcaagcgacgtaaaccgcgcaggcgtaaaggggcagctcggctctgccgccgcgtgcggcatctgccacagctttgcaagtgacggtcggtgcatctcccttttaaaggtgctaatgacgaacatatgtgcttatgattgcacgtattgcctcaaccgccgctcaaacgacacgccccgcgcgacgtttcgcccgcaggagttggcggatctgaccgtcagcttttaccgtcgcaattatattgaagggctgtttttaagctccgccgtgttcggctcgccggacatcacctgcgaaagaatgctcgaaacattgcatattctgcgtaacgagtatcacttcaacggttacattcacgtcaaagccattcccggcgcggacgagacacttttgcagcagctcggcctgcttgccgaccgtatgagcgtcaatatcgagctgccgtcaaacgacagtctaaagcgccttgcgccacagaaatcgaaggaaaacatcctgctgcctatgtcgcgcattcgcgacggcatcaaggaaaacgcgcacgatctcatacggtataaaaatgcgccgcgcttcgtaccgggtgggcagtcaacgcaaatgatcatcggcgcaacgccggaaaacgaccgacgtattttgcagctgagcgaaggactttaccacaagtattctttaaaacgcgtgttttactctgcgtatataccggtcgtgcaggacagaaatctgcccgcgctcgacaccgcgccgccgcttctgcgcgagcatagattatatcaggctgattggcttttgcggttttacggcttcacggcggacgaattattgagcgaaaaaacgcccgacctcgaccctatgttagacccgaagtgcagttgggcggtgcgccacccggaggaattccccgtggaggtgaaccgcgcgccgtatgagaaattattgcgcgtgccgggcatcggcgtggtgagtgcaaagcgtatcatccgcgccagacggcaagcaaagctcgaccacgaggggctgaaaaagcttggtgtcgtcttaaagcgtgcttcgtattttatcacctgcaacggcaaaatgcagtgccgtttgcgcacagacgaaccggcggttttggcgggcattctgcgcgaccgcgggctgccgcaaggcggcatacagcccgaaattcccgagcagctttcattattcaaccccacaaaggaggacgcggtaaaatgtctgaccggacaattgtaatgtattactacgacggcacatataacggctttctttcctgtgtgttcgagagctttgcggaaaaagaaacgcctgccgcgattttgcccgttgatgaagccgaccagacgtgtttattcggcgcgaagtatatcgagaccgacctgcgccgtgccgagcgtgtgcgcgtgtcgattccgaagaaaatgggcatggaggcgcaggatcttttggagcgtgcgttttttacctgtatgcccgaaaaggaactgcgtatgctggaattcatgcggttggggtacaaggtcgggcgcggcgtgtgcgggcgactgaccgaacctgccgtcgataagatcacgaaagcggtgcagttccttgagcgggaagcgcacttgtacctcggttttctgcgctttgcggagtacggcgacgttcttatcgcgcagattgagccgaaaaacagcgttttacccgttatcgcgccgcattttatcaaccgtttttccggtgaagatttcatgatcttcgaccgcacgcataagcttgctttattatataaagacggcgcgacggaatttttgcaggcggagcacatcgagctgccgccggaatcgccggaggaggagaaattccgcgccatgtggcgcacgttctacgacaccgtgggcattgagggcagacggaacgacctgtgccgccgcacccacatgccaaagcgctactggaaccgtatgacggagatgcgggataaggtttgagataaaatgagaatgaaaaaaggacggcttccggggaagctgtccttttgaggttttactaaaattacgttcgcggggtttggcagacgatgtccacaaaaaggcggccgtcggggagaaagctgacgccgagtgacgcgtcgcaattttcggacaccgaccagtattcgttgtagacctcgccggagccgacggcgtcggtgctcaggcggtcgaggtgcgtggagatgcggttttcaaggccggggtaggtggtcggctcgccgtactgcgcggtgagggtgtcaaagagcttttcgggcagcttgcagtccgcatcggtcgggttttcgacgactaggaccctgcggtagccgtaaagcgtatcggtgttgagatcgaaaagcaggtagaccgaaaaatcatggttttcgagcgtttcggtccggtctaaaacgtaggcgttggcataaaggtcgtcttccttgtaggtgagtttttccgcatcgagtgctgcgagcacttcatccttcgtttcgccgaacatggcgggataatcgagcgctttggcgcctttttccgccgagcaggcggtgaatccgagcagaagcaggagcaacagaaaaacggggaatgcgcggtttgcggcatagtacgcaaaatgagaaagcgagcgctttttcatggtatgacctcctgttcaggacgatgttttttatcttgattatagaaaagtgcggagaaaaaatcaatagtcaaagaagataaaaacgaggggcgtttgttgggcgaaatgacgggctgcggtgaacgtgcgtcaatccccaatcgtaataaactgcgtatgctccggcaggttttgaacttcggttttcaaaaatgccggccttaaatcgatatacggcagctcttcaaacgggaaccacgcgaagtggacgctcggttcattcggactgtcgaaacggtcgccgcgggtgatgagatcggtgccggaagcgtctacggtgaagtaggtacaaagctcgtggtaacgctgctttttgcctgtaggggtgaagaagctttgggcaatccacacggcgcgctccggcgcgacggtgacacccagctcttcttttaactcgcgcgtgagggcgtcctcggccttttcacgcatggtgacgcggccgccggggaggtagtagtgctctgcgctgtcgtcttttgtgacgagcagcttgccgttctgcacgatgatggcggcggtgcggaagttgaacacgcctttatccgtggagaatgagatgttcgggttatacgaggcaaattcctttgcgagccttacggcgagcgcgacgatgttctcgttcgcgtgggatttatcgaatgtgcgacagctttcgcgcatgcggcgcagacgctctttatgctcgatgagtgaggacacgacagcggagaaattctcctttgtgacgcgcacgcccatatcgtgtgtttgcaggaagttggcgttatcttcctcctggccgggaatggcgtcgaacacggcgagcggcaggttgcatgcgagcgcttccgaaacggtgaggccgcccggctttgtgatgatgaggtcggacgcgtgcataaagcgctctacttccgttgtgaactggataagctttgtctttttcgacgagttcggaatttcgctttcaaagagcttatagagctttttgttattgcccgtgatgatgatgatctgtaaatcgagcggggaggagcacaggccgcggtagaggtctacaatgttggagacgcccatgctgccggccatgaagagcacggtgggcacttccggctcgagatccatttcggtgaggagcttcgcctgatcttccttgtcgaagaagacgtcgtgtaccgggatgccgtaggggtagatatgctctttcggaatgccgagacggcgcaggtcgttcaccatgtcgtcacaggcgacgacataggcgtcgacattcggggcaatccacgccttgtgcacgccgtagtctgtcatgaggcagatgagcgggcaggtgatgcggcggcgctcctttaaaccggagatcatctctgttgcgaacgggtgcacgctgatgatgacgtccggcgcgacctccgctaaacgcggatagagctggagcgccagaagctccgttgtgcgggggacgaaatccgcaaggggattatctttatttgtcgttttgtagaggcggccgaagagagacggggtcttctttgccataaagaggtagctgtcgcaaatggttttgtcgagcagcttgccgatgctttttaagaagtccatttgaatgacttcgtgggtggtggtttcgcgtatgtatttttcaagtgccgcagccgcgcgcaggtggccgccgccggtggcacaggtgagaatcaaaatgcgcatgataccgctccttttcaatagccttttcatcgggtgtgtctgaaaaatcaaaacttattttcagatactccctgtcctttgctccagtttatcacatttttttgtgaatttccatatattgcgcggaaattaagaaatcaaatccgaaaaaagagtgaaatttgcggaaaatttgcatttttctggagacttttttgcggctttgcggtatacttaaagtaagcggagaacctatatgcgttcaaaaacttttaagacatatttaaacgtatgtctttacaagaaaagatgcggcaggtataatattctcagccggtattttgtcggcgaaaaggagagaatatctgcaaaacgtaagtcggtacgatacagaaaagcggctgtgagaagctgccgggattttcagaaaggcgatctagaaaggcgatctcatgtatagacataaaacgaaaaaatatcgcgcggcggcggtcggcgcagttttggcggctgtcttgatgttgggctttgcgggctgcgataagctgccgacgtcttccgactctgcggcgacggcggcgccgacgcctaccccggagccggaagacctgaccgtgtttgcggaaggtaccacgatggacggcatcgacatttccggcatgaagctcgcggaagccgaaaaggtgtgcagagcagcggcgttaaagccgtatgcgaatatcaacgtcacggtgaaaagcggcgacaccgaaatgaccgcaaagggcagcgatctgaccgttgtggatacgctggatattacgctgacgcggcttttgaaatcgagaaaagcgggcgactacgaaatgacgtactgcctgacgctcaagaattttgaaaatgaattaaagcaaagactcggcgatttcgtcgtgcaggctaaggacgcgaccgtgggctcttatgactttgacgcgggcgactttgtgtttgaggacgccgtgaacggcaaaaagctggacgtttacggaacgcttgccgccgtgaaagcgcagttccttaagaaaacgagcggcgaagtggaggctgctttgcaggagaccgcggcgaaagtgaccgtggacgacctgagaaaagatttcggcatgatctcctcgtttgagacggtctcgacgaatacggaaaacggcaaccacaacatgggcctggcgctttcccgcgtgaacggcacggttttgaacccgggcgacacattctcttatgaaaacattgtgggcgattccacaaacgcttccacgggctttttgccggcgggcggcctttccggcggcgcgctggtgcagatgtacggcggcggcatttgtcaggcttcttcaacgatctacggcgctgcgctgcgtgcgggcatgacgatcacgctgcgcgactgccattcttcaccgtctacgtacgtgccgatcggtctggacgcgacggtgagttacggcgagatcgacttccagttccgcaatgatcttgacaccccggtgtacattatgagttggatggacggtgtgacgctgcatgtgcagttctacggcaagcacccgaaagagtgggacacgatcaatgtgtattcccagacgacgagcgagatcccgccgctggacactgtgaaatacgtggtggaccagaaccttaaaaagggcgaaaaggtgctttccacaagcggcaactggggctatgaggcgagcgcttggcgcgattttgtgaaggacggagaggtcatccgcaccgagacgctgccttcctcctactacggcccaagcggcaccatttaccgcatcggcccgggcacggagacgtcttccccgagcccgacacctgcggcaaccccaacggcagtgcctactgcgacccctgcgccgacggctgccccgactgcggcgcctacgccggagccgacccctgcgccgaccgcagaaccgacggcggcccccacagaggagcccacaccggagcctgtgacggcggccgaaaccggcgaatgagaataaaaacagtttccccctgctcttttttcggcagggggaatttgtgcaagtgaatataattgtgtcacctccggtgacacttgagaggagcttatttgtgagcataaaaatagacggaatggtgcgcgtggcggcggctacaccgcacgtgaaagtggcggactgcccgtacaacaaaaacgagatggcgaagatgatccgcgaggcggccgcaaacggcgcttcggtcatcgcgttcccggagcttgcgatgacgggatacacctgcggcgacctgtttaaggacagaaagctgatggaaagcgcgaaggcgtgcctgtttgacctcatcgaagagacggaagacctcgatattctgtgcgcggtgggtatgccgatcccgtccggcggggcgctgtataactgcgcggcggtgttcagccgcggcgttttgctgggcctgccggcaaagcagcatattccgaattactccgaattttacgagctgcgccatttttcccccgcgccggaaagcggcatgctgcgctatgcgggcgactggtacggctgccgtgacgtggtgtttgagcttgcgccggacgtgaccgtgggcgtggagatctgcgaggatgtttgggtggcagatccgccgagtgtgacgcttgcaaagggcggcgcgaccgttttattaaatctttcgtgcagcgatgaaattatcggtaaggcgcagtaccgccgcgacatgctgcgcatgcactccggtcgtctgcttgcagcgtatgtgtacgcggacagcggctttggcgaaagcacgacggacatgatctttgcgggacacaatttgatttgcgaaaacggctcgttactgaacgagagcgatttgtttacgaacggcatcacctacggcgacatcgacgtggagcgccttgtgcaggagcgccgccgcatgaatacgtggcaggacgagcctgtgtgcgacatcatcgacgcttcgatggacctgcccgagtttgagacgacgcgcacggcgtacccgtacccgtttgtgccgaaggacgacgccgacctttccgcacgctgcgagacgatcctcaaaatgcaggcgacgggtctcgcgacgagactgaagcacatcggctgtaaaacggcggtcattgggctttcgggcggtctcgattccacgttggcgttgcttgtgacggcgaacgcgtttgatatgctcggcctgccgcgcacgggcatccgcacggtatcgatgccatgcttcggcacgacggcgcgcacgaagagcaacgcgcagtgccttgcggaagagctcaaggtgcattttgacgaaattccgattgcgaaggcggtggagcagcactttaaggacattcagcacgatcccgaggtgctggacgtgacgtatgaaaattcgcaggcgcgcgagcgcacgcagcttttgatggacattgcgaatcagtacggcggtattgtcatcggcacgggcgacctttccgagcttgcgctcggctgggcgacgtacaacggcgaccacatgtcgatgtatgcggtgaacgcgtctatcccgaagacactggtgcgccacctcgtgcgttatgaggcgatgcacggcaacgacgagctgcgccgtgttttacttgatattttggacacgccggtcagcccggaattattgccgccgaaggacggcgaaatttcacagaagacggaagaccttgtggggccgtatgaactgcatgattactatttgtattacatgctgcgttttgggtttacgccacgtaaaatttatgcgatggcgctgcgctcatttgcggggcagtatgacgccgagaccattaaaaagtggctgaaaacgttctaccgccgcttcttccagcagcagtttaagcgctcctgcctgccggacggcccgaaggtgggctctgtgacgctttcgccgcgcggcgatttccgcatgccgagcgacgcgtgcaatacggtgtggagagaggagatcgagacactgtgaacattttagttgcgatggagacaaagccctatcagcgcgtgtggctcgaagaagccgcgccgggggagacgtttatttataaagagggcaaggcggagcgcgaggacgtgcagaacgcggatataatcctcggcaacgtgagcccgaagctcatctcgaccggcgataagctcaaatggttgcagacgaacagtgcgggcgtggacgggtatatccacggctgtctgccgaaggagaccgttttgacgaatgcaacgggcgcgtatggccttgcgatttcggaatacatggtcgcggtgtggcttgaacttttaaaaaagctgcatttgtaccgcgatgtgcagcgcacaggcaagtggtgcgacctcgggcaggtgcgctcggcgtggaactcgacggtgctggtgctcggcctcggcgacatcggtggggaatttgcgaagcgtgcgaaagcgctgggcgcaagggtgatcggcgtgcgccgcacgggtacggataagcccgattttgtggacgagctcatccacaccgataagcttgacgaatatttgccacaggcggactgcgtggccatcacgctgccgggcacgacggcaacgaagggcatgtttgacgcagagcgcatggcgaagatgaaggacggcgcgattttattaaatgtcggccgcgggatgatcgtcgacacagatgcgctgtgcgcggcgctggaaaacggaaagcttgcgggcgcgggcgtggacgtgaccgacccggagccgctgcccgcagatcacccgctgtggaagatggaaaacgcggtcatcacaccgcatatctccggcggataccatttgcaggagacgcacgaccgcattgtgcgtattatggcggagaatttaaagcgtttcctggcgggtgagccgcttagaaatgtggtcgatttttcgaccggctaccgaaaactgtaagggataatgatggatacgacacaggaaatttatttggacaacagcgcgacgacgcgcgtttcaaaagaggcggcggaaaaggcgctttacatgatgacggaatgctacggcaacccctcttcgctgcacagcaagggctttgcggcggaaaaggagatgactgcggcgcgggagatcatcgccgagagactttcggcacagccgggggagatttatttcacgtccggcggcacagagagcgacaacattgcgattttgggtgcggcgcacgcgaaaaagcgcgcgggcaacaagattgtgacgacggcgatcgagcatccggcggtgctcaatacgatggcacagcttgaaaaagagggctttgaggtcgtgtatgtgcagccggaggcggacggaaatattccgaaagagaaatttgatgcagccattgatgcgaagacgattttggtcagcgtgatggcggtgaataacgaaacaggcgttttgctgccgctgaaagacattgcaggcatgatcaagaggaaaaaggccccggcgctgtttcacacggacgcggtgcagggcttctgcaaaattccgctccagccgaaaaagctcggtgttgacctcatcagtgtttcgggccacaaggtgcatgcgccgaagggcgtgggtgcgctgtacgtgaaaagcggcatacgcattttgccgcacagtttcggcggcgggcaagagaaaaatctgcgccccggcaccgagggcgtgccgcaaatttgtgcgttcggcgaagcggtgaagcacatgatgacggaaaaagaggcgctcacacacgtaaaagcggtgcaggtgcatttgattgaacggctgaaagcgatgccggaggttgttttgaactcgcccgaaaacgcgctgccgtatattgtgaatctttcggcagggcgcgtgcgcgcggagacgatgctgcactttttggcggagcgaaacatttttgtttcaagcggttccgcgtgcggcaaggcaaaaccgagccacgttctgagcgcgatgcagctgccgaaggagcgcgttgaaacatcgctgcgcgtaagcctttcggcggaaaacacagcagaagaaatggacgcgtttgcggacgccttgaaagagggcctccaaacgctttcgcacgcgtaagcgtgagtttatagacggaaaggaattttgtcatgcaggaagtgattctggtcaagctcggcgagatcgtcttaaagggattgaatcgccgcacgtttgaagaccgactgttaaagaacattcgccgccgcattgcgcgcgcgggcaactttgaggtgtactccatgcagtccaccatttacattgaaccgaaggacgaggacgcggacattgacgaggccgaggagcgcatctcgaagattttcggcgtcatcggctatgcgcgcgcttgcgtgtgtgaaaaggacatggacgccattacaaaaatggcgccggaatacctcaatgacacacttgcgggctttaagacgttcaaggtggaatcgaagcgtgcggacaagaagttcccgctcggctccatggaaatctcccgcgaggtgggcgcggcgctgctgtgcgcgaacccgcacatttccgtagacgtgcataacccggagatcacggtgcgcgtggaaatccgcgagaaagcggcgtatatccacggcgagacgaagcccggcgcgggcggcattccggtgggcacgggcggcaaggcggctattctcatcagcggcggcctcgacagcccggtggcggcgtggatgatggcaaagcgcggcgtggagctgacggccattcactttgcgagcccgccgtacacgagcgagcgcgcacatgaaaaggtggtggcgctgctgaagaaggtcggcgaatacgcgggcagaatggacatgattaccgtgccgttcaccgaaattcaggagcaaattcgagacaactgcccggaggagcttgcgaccgtgattatgcgccgctttatgatgcgtgccgccgagcgcattgcacgcgagcgcgaatgcagtgcactcatcacgggtgagagccttgggcaggtggcaagccagacgatacaggccatcgcctgcacggacgccgcggcgaatatgccggttttccgtccgcttatcggcagcgacaagtcggaaatcgtgacgcttgcgcaccgcattgacacgtatgatatttccattgagccgtatgaggactgctgcacggtgtttacgccgaagcacccgcgcacccgccccactttgaacgtggtggaggctgcggaacagaaacttgatgtggaacagcttttgaaaaattgccttgaaaagacggagatccgtcatctgtaagaaaggggaattttaccatgcaggcagaagtattatcggtaggtacagagcttttgctcggccagaccgtgaacacggacacaacaatcgttgcaaaggcgctttcggcgctcggcattgatctgctctacgccgccgtagttggcgacaacgtgggcagactggaaaaggctgtttacgacgcgctcgacagaagcgatattctcatcacgacgggcggccttgggccgacgggcgacgacctgacgaaagagaccgtggcggcggctgcgggcaagaagctcgttttgcacgagcagagctaccagcatttgctcgattactttgcaaacggcggcatgaccgaaaaccagatgaagcaggcgatgctgccggagggctgcaccgcgctgaaaaacgacaacggcactgcgcccggctgcgcgttccggacggacaagggcaagatcgtcatcatgctgcccggcccgccttcggaattgaccccgatgctgcacaactatgccgtgccgtaccttgagaaattccagagcgcggtcattgcttcgcacagcgtgcatgtgtacggcagaggcgaagcgccggtggcacagatgatcgaagacctgatggagcagagcaacccgaccgtggcgccgtatgccaaggaaggcgagatgttcgtgcgcgtgacggcgaaggccgcaacgaaagaagaagcggacgcgatgtgcgtgccggtggtggaagaattgaagaagcgcatcggcaacttcgtgtacggtgtggacgtggagacgctggaggagcttgtggtcagtgagcttaaaaaggcgggcaagaagcttgcgacggcggaatcctgcacgggcggtatgcttgcaaagcgcattacagatattccgggttcctccgccgtgtttgagacgggctgtgtgacgtatgcaaactgcgtgaaggagcgtttgctcggcgtaccgcacgagacgcttgtgacatacggcgcagtgagcgaacagacggcgcgcgcgatggcggaaggcattgtgcgtgagagcggtgcagacatcggcgtgggtatcacgggcattgcgggcccggacggcggcacagaagaaaagccggtgggccttgtgtacattgcgttgagtgacggcaagaacacgtgggtggcaaagcgccagccgatgggcagactgaaatcccgcgaatggcaccgccactgcgcggcctccaaagcactcgatatggtgcgccgctaccttgccggtttgccggtggacgaggcgtaacgcgtgcggcgcaaataccgcgagccggagcctatgcggcgcgtggcggtctatgaagacgaagaaagtatgcagccgagaaagcggagaattctgttcccggtgctcatcacgctgttttcggtgatttttgtcgtttcggcggcggtgcttgtaattgagctcattgtgaacccgtatgtgacggataaaaacgtaggtgagattcagaaaatctactccgaagcgggcgacacggaaagcgtggtcccggcgacttctgaagacgacacggcggacagcgaacgcatggcagagctggagcgccgttgcgaagctgttttgaagctgcaaagtgtgaacagcgacattacgggctgggtgcagctggacggcacggacatcaattttccggtgctgacaccgcctgcaggcgacccgcagtattacctttaccgcaactacaaaaaggaaagcacgaagtacggcagcatctttttggacggtatgtgcacggtggactccgataatcaggttttgcacgggcacagcatgcaggacggcagaatgttctggcaggtgatcggttttggcagtgccaagaccgtgaaaagctgtccggtattccgctatgacaccgaaaaggaagcggcggaatggaagattgtttcggtattcaagacgaatacatacgataaccaaggggaactgttcaactatctgcgcggcgattttgactctgcggaagacaagatgcagttttactacgatgtgatgaaacgcagcatggtgaacaccggcgttgacctgaacgaaaacgacaaaacggtgatgctttcaacatgctcgtatgaatatgagggcttccgcacggtgatcgtggcgcgcaaggtgcgtgacggcgaagatgcgaccgtggacacctcaaaaatcacggagaacgaaaacgtgttgtacccggacatttggtatccctccggcaaagcgccggactactggcccgactactttgaggacgctgtccaaaacggcatggtggattggtacacgggcaatctgtacaaagattaaaagctgaaacagaaaacgaaaaacgccctcccgcttacggaaaaaccgcagcggaagggcgttttggtatgttatcttttattttttgtacttcaaagcgcggatggcgttgagaaccgcgataatcatgacaccgacatccgcaaagatggctgcccacatgttcgcaagaccgaacgcggtgagcgcgagacagccgaacttgacgatgagcgagaacacgatgttctgcttgacgatgccgatgcacttacgggaaattttgatggcctttgcaatctgcatcggatcatcgtccatgaggacaacgtctgcggcttcgatggcggcatcgctgcccatggcgcccatggcgatgccgatatcggcacgggtgagcaccggcgcatcgttgatgccgtcgccgacgaacgcgaggtttgctttcttcggcttattctgaatgagcttttcgacttcgttgaccttatcgcccgggagcagctcgctgcgaacttcgtcaatgccaagctctttggcgacctgatcagccacacgcttggcatcgcctgtgagcatgacggttttttcaacaccggcgtgcttcagcttctgaatggcttccttggaatgaggcttgatgacatcggagataacgatgtgaccggcatattcgccgtcgattgacatgtgaatgatggtgccgacgctgtggcagtcgttatatggaatattgtgcagtgccatgagctttgcgttgccggcgaggacctcgtgcccgtcgaccttggcggtgatgcccttgccgctgacttcttcaatgtccgttacgcggctgcggtcgatctctttgccgtaggctttctgcaaacttttgctgatggggtgggaggaggcgcactcggcgagcgcggcgtactcgagcagctttgcttcgtccatcgtgttgtggtggacggcagtgacctcaaacacgccctgcgtgagcgtgccggttttatcgaacacgacgatttttgcatcggagagggcttcaagatagttggagcccttgatgagcacgccctcatggcttgcgccgccgatgcccgcaaagaagctgagcgggatggaaatgacaagtgcgcacgggcagctgacaacgaggaaggtcagcgcgcggtagatccaatcgacccaagcggcatccatgccgaacgccatgcgcaggagcggcacggcaatgccgagcagtacagcggaaatgcagaccgccggggtgtaaattttagcgaagcgggagatgaacgcttccgaacgggacttgcgggaactggcgttttcaacgaggtcgaggattttggaaacggtggactcgccgaattcctttgtggtgcggattttcagaacaccgtttaaattgatgcagccgctgatgatctcatcgccctctttgacatcgcgcgggaggctttcgccggtgagcgcgctggtattaaggcttgcgttgccgctttcgactacgccgtcgagcgggactttttcgcccggctgcacgacgatgatgctgccgaccgcgacttcgtcgggatcgacctgttctaacttgccgtctttttcaatgttggcgtagtccgggcggatgtccatcagcgcggagatgtttttgcggcttttgccgacggcgtagctttggaacagctcgccgatctgatagaacagcatcacggcgatgccctcaagataatcgccgctctttgtccaaatggcgaggaagaacgcaccgagggtggcgagcgccatcaaaaagttttcgtcgaacgcgcggccgtttaggatgcccttgccggcttttctcaaaatatcgtagccgatgacgagataggcggcgaggtacgcgataaggcgcggaatgcccgtgataggtaagaactgtaacacgaccagcatcacggcggtgatgatgatgcggtacagcgtaatcttttgtttctttttcatgaggatacctcttgtggttttatatagcagttagatgatacattaccgtgtgaaaaagaccgactgtaccgagaaagcggagccggtcattttttctgactatacgggtagaccgaagtaaattaaagctcgatttcgcagtccggctcaaccttcttgcaggccttgaggacattcttcatgacagctttagcgtcctgaccgtcttcaaactcaacgatcatcttctgggtcatgaagtttacggtcgcatttgcaacgcctgcagttttcttggttgcctcttccatcaggttggcacaatttgcgcagtcaacttcaatgctgtacgtttttttcatggggaaaacctccgtaaaaaatcattttgttttgaaatgtggtgctaacgattaaatacttgcttaatcgttacagttgtagtatactggggccggaataaaaaatcaaggggttttcgggtgctgcttccaaacgggcgaacgggatttccgaaacggataaacggagggctttttatggcggattttgcattgccgcacgaccacggcaggcacaagcacgacgaagcgctgcatagagaattgatgaatacggagcgtttttcggccgtggcggatgtgtttaagcagctgagcgacccggtgcgcgtgcgcattttctggcttttgagtcaccgggaagaatgtgttatcaacattgcagcgatgatggatatgtcgagtccggcagtttcgcaccatttgaagtcgcttttagacagtgggcttatcatgagccgccgcgatggcaaggaagtctactataaggcgtcggacaccgagcagatcgggcttttgcacgagattgtggagcaggtgatggagatcacgtgcccggaaaaggaagtggactttcaggcttcgcaggaggagatcattcggaacgtgcacaattacctgattgaacacatcagcgagcgcatcacgatagaaacgctgtcaagagagttccttatgaacaccacgacgttgaaaacggtgttcaaaaaagtgtacggcacgacgattgcggcgcacatgaagcagcaccgcatggagcttgcggcggggctgctgctgaaaacgcagaacgacattgcgtccgtggcgcaggccgtggggtatgagagccagagccgatttacggcggcgtttaaggaggcctacggcgagctgccaacggaatacagacggcggcacgtgtgcggggcaaagaagcaggcgtgcgggacgtgtacgtgctcgacgtgtatgagacggtgaggagcttgttttgagagcttttagaaattaacagagcgcgcagcttttgggtggctgcgcgctctccttttgtatgcgatgctttttctaaaggcggctttagccgcctttcaggaaactcatgcaacgaggttccctacacttaaaacgtccacgggacgttttaagttactctcctagtttttggggcgctgccccaagaccccgccgcctttaaaaaggcgggcgaaacttttaatcgccattgccgttagcttagaggataaggttttccagctcctctgcgttatggacgagggtatcggcgccgttttcttcgagctctttttcgtccctgaagccccaggtgacgccggcggtgaagaggccggcgttctgcccggtctgcatatcaacgccgctgtcgccgacgtacaggcattcggcgggggtgacgcctaattcttcgcacaataaaagtgcggcactggggttcggctttttcggtacgccttccctttgtccgtggacgacatcaaaaagcccggtgaacagcttttcggcgatatagcacgtcatgttatcgggtttgttggagagcacggcggctttgacgttgttttcacgcattttttggagcagctctacgatgccggggtagggctttacgtcttttgtgggatcactttcatataaagcgtcatacgttttgcgcagagcttttacatcttcttcggtgtatgtgcccttagcggcagtgagcatgcggcgcatgagaatatctgcgccgttaccgacgaacgtgcggtagcgatctacggggaacgtttttaagcggtgcgcttcaagcgcggcgttgccgaatccggcgatggaagtgagcgtattggccacggttccgtccatatcaaaaataacggcttttacttttgccatgaatatcccttcttcatattatagataatcgaaaagcgaacgacacttttcgcaccgccagtataccgcttttttgacgaaaatgcaaccggggcgggctttttggggtgtgaaaaaactatctgaccttaaaaattatattaaatctggccattgcgataataccagcgcggtgctatactgggtgcaatcttcaaggcacggcgcacgaacggtgcagtcgcgccccaaagcaaaggggtaatcaaaatgaaaaacaagaattccatctacaagattgtcaccgtgggccttttgggcgcgctggtgttcgtttccaactacctgagcttcccgattccggtgccggtgggcgatatttcccgtatccacctcggcaacgcgttttgcctgcttgcgggctttgtgatgggcccgatcggaggcggtctggcttccggcatcggcgcgatgctctacgacctgacgaacccggcgtacatcgcttcggctccgtttacatttgtatttaagttcctgctggctgcggtttgcggcctcatcgcgcacaagggtaaaatcaccggcaacatgctggaggaagactttaccattaccgtaccgcgcagcattgtggcgggcatctgcggcagcctgacatacattgtgctgtatctcgcaaagtcctacattacgacggtgcttgcgggcagtgcgccggaggctgcggcgattgcgcttgcgacgaaagcggcttcgagcacggtgaacgcgattctcgccatcatcatttccgtgccgctctccgctttgattcgcaaggcgctgaaaagtgcgcatctgacgacaaaataaaatcagcgtataaggaaagccgccggaacacgcaccggtggctttcgttgtttttgtgtgacagagatttcttgcttttttcatgaaactgttcactgcacttcacatgaacttcacagaactccgaaataatatagataatccgaacggaaagaaaaaaaggttgaaaaaccgtttggaatatggtatcatgtgaaaggagtaaggaaccatgagtgacaatcatgagaaattccaaaatggttttgacccgaacaatgggtctgaaccggtgaacaccaatacttccgctaataacgctgtaaacagcacaaacgcctacggcacctatcataacgcacagtatccgacgaacaacacccccgcatatacgtggaacgcacagagcgctccgcaacagaacgcgccggtgcagccaaacggacaacctgtgtattacggtgtgcctgtgcatcagccgcaaaaacagccgaagcccaaaaagcacggctcgaaattcggcttgaagcttttagccgttgtgctttgctgtgcgatcacctcggcggcgtcgcttggcgtattcgtcgtgatgattcaaaacggcgtcatcaatgtgcagtcttccgaagcgagcagcaatgctgcgttcacaatctcgcgcgtggtgaacggcgacacgaactcggatacgagcgcgagcagcgacggcacggtttccgcgatgagcgaccaggacattgccgcaaagcttacaccgtctgtcgtgtgcatccagaattatcaggtgacacagaattacggctttatgcagaccgacacgtcggacagcagcgtttccccggcgagtgaaggctccggcatcatcatgagtgaagatggctacatcatcacgaatgcgcatgttgtggagggtgcgacttccctgaaggttatgacctccgacggtgagacgtatgaagcgcagctgatcggcagcgataccgtgacggaccttgcggtcgtaaagatcgatgcgacgggcttgacggctgcggaatttggttcttccgaagatttgcgcgttgcggataaggtcatggccatcggtaacccgggcggtcacgagctgagctccagcgtaacgatcggttacgtttccgctttgaaccgcgcgatttccaataatacgaccggctacacgatggaatacatccagaccgatgcggcgattaaccccggtaactccggcggcgcactcatcaacgagtatggtcaggtcgttggcatcaactccgcgaaaatttccgctacgggctatgagggccttggatttgcgattccgatcgatacggcacagccgattatctccgacctcatccagtacggttatgtgaaggacagagctgttctcggtatttccggtcagttcattgacagcatgacgggccgcttctacggcttgccgcagggcgagtatgtggcacagctcaattcgagcgaggcacaggcttccggcttgcaggtgggcgatgtgattaccgctattgacggccagcagctggacagtgaatccacattgcgttccgcaatcctcagcaagaagccgggcgatacggtaacacttcaggtgtaccgctcttcgacgcagcagtccgcaaccgtggaactgaagctttccgaatacagcgcgggttgatttaatttagagtacgagtctttttcataaatctcctttttcaagcaacgaaccccgaggtaacccctcggggttcgttgcgttttgtcggcttttgattttgctgccgtgggtattcccggctgtgattgagggtgcgcagtatctcactctttttctcggtcagagggagcttgaattttatacgaaggcataaagtaacgccgcactctcaatgaaaaatcgagggtgcggcgttgctttatttctaagaattcgctgtggcgagttcttcaaggaaccccttaatagggttccttgcggcagaacagtccaccggactattctgcctatcttcctgatttttggtaggtaaaaaggtctcgccgtttgcgaacgacgaccaaaggcgttgcctttggaaaccaccacctttgaaaaggcggacgaaactttattcgtcgcttcgctgtggtttacggaagatcaattccctgtaatggcgtttaaggcggcggagacgacttcaccggcggtatagagtccggaggtgccctcctgcacgcacacggcgaacgcatacggggtgctttcgtcctccgagaaaccgacgatccagcagttcgggtttttatcgtcgagctcggcggtgccggttttggcacacagcgaataaccgtcgaaaagatactcgccgtagtaattgacgacgttgttgcgcatcatgctgtggagagaagcggcagtggagctgtccgttaaggtgtagctcgtgcggcttttgccgcccgtgaggtatggctccggtgtagagccgccgtttgcgatggcgcccatcaaaagcgccatgtggtacgggtttgccatgacatccgcctgaccgacggagctccatgcgaggtctatggcgctggtggagctgcttaaattggtactgcttttggtggtggtgaaggaatcaaacgagaagtttttaccgaagcccatttcttcggctttctttttgaggttttccgcgccgatgtcctccgcaagctgcgcaaagtagaggttgcaggaatagccgagcgcttgctcgaggttcagctcgccgtggtaattgagacacgtcaccttgccggagccgatgtccatttcttcttcgcaggtataggtgcgggtgtcccaatcgggcaggtactccatggcggcagccgctgtgacgagcttaaagatggagcccggcgtgtaggtggaggaaagcgtgtggtcgaggaaaacgccgttgtattcttcgttatcgttgaggtcctccgggacgttcatggggtcgtatgtgggagcgctgaccttgacgagtacctcgccggtcttatagttatagacaaacgcggagccgttgcggccgttgaaggcgttgtacgcggcggcgctggcgttggcatctaccgttaaaacgaggttgttgccgaggtccgaaagcacggtgcgcgcaaggcccgtgatggggttatagcccacgagctgtgagcggtgcacggcctgcacggcggtgccgatgtagccgctggaatcgcccacggtgtggagcagtgcgcggcgaatgtcttcactttcggcgtaaacgcgggagccgtcctccgttttggcgagcaccatgccgctgcggtctgtgatggtaccggcggaaacggcggtgtcatcgccgtaaatgtgaccgttatacggctgcgtggcccatgtggagccgtttaacgcgaggttgatgaggaaccagacgaagccgccgcagaaggcgaacagcaaaatgtaaaggacaaaagagcgaaagccggtcgttttcatcggcggtcaccatcctttctgcgtgtgcaggactgacccggcgagaggttttcttcggaaatatggacgcggtatgcgccgcgggaacgcggggccgtgttttcggcgcgggtattcacgcggggccgcggcgtgggcgggtcattcggggagtagcgcggcggggtgaaggaaatcgtgtcttcgtcggcctcgcctttcgggtgtcttcccgcacggcgggcagcgtaggtgcgttcatcggacgctttgaggaatgccagaagcccccagacagagatcatactggagccgcctgcgctgatgaacggcagcgtgacgccggtgagcggcagaacatccgtggggccgaagacattgagcgcggcctgaaagagcagcatgcccgagacggcgcacgccgcgatggcgtagaacgtggagcgactgcgtgtgacatcgctgcgggcgtagaggataaagaggacgagcgcgaacagcactgccatgcccattaaaaggccctgttcctcgcacagcataccgaacacgaggtcgctgtcgccggcggcgacatattttaagatgccgttgccgaggccgagaccgaagaggccgccgcttgcgatatacgtcatggtgcgcacctgctggtagccgaggctgtcctgtgtgtgctcccacacgtgcagccagcccgagaagcgctgggcaacgtagggtttaaactgcaaaatgaggaacacgccgaagcacgctgccgcgaggatgaggaaaatggtgcggaagctgccggagcgcatgaacgcgatgatgaggaagcaggcgaagaagatgagcgccgtgccgaaatcacgcatgaggaacaggaatgcgaggcaaatggcggcgaacacgatgaactccgtgatgttctttttcgtctgcaaatggtcgagcgtagacgcgccgacgaacacgaatgcgattttgatgaactccgagggctggaagctgaacggcccgatgaagatccagttgcgggagccgttgacgtctttgccgagcacaaggtttgcaacaaacagcaaaatggcgccgatggcgatgtagagccgcagcttcatgacgcgctcgaggtcgctcatgaaccaaacaaggaagcagaaaagcacaatgccgatgccgaacgcggcaatctgcattttaacggtgtcgagcccctcaccgctgaggagcaggatgccgatgctgctgaggagcagcccaacggtttcaatctcaaagctgacgcgctttaagatgcggcgggagaaaaagtacagcacccagcttgccgtgaacagaatcacgaacggtgcggcggggtagaggcggaattcgcctgtgccgatcatcagctgcaaggtgagcgacatctgaatgagcgtgacgacgagcatcagcttaaagggggacgccgcctctttggaaaatccggtgaacatgctgcgctttttctgcggcacgtcggacgcgttacgcagcgtgagcgtggtggagcccatgcggattttgtcgccgatctgcacgagcgtgggctctgtaatctgtttattgcgcacgcgtgtgccggcgtgggagccggtatcgcacacgaaccagccctcttcgcggcgcattaaaacggcatggtcgcgcgaaacggaattatcgggtatttgaatatcgcagctgcggctgcgcccaatggaattctcccagtacaaaacggggaaatgcgcgccggtggcggcatcctccagcatgacgaccgggtctttgcggcgctgtccctttttaaacgaggtatagcagcgccagataacgtacaaaaccatcaggacggtgacggcacgcacgagcacaagggcggtggaaagcagcccggagccgagtatgcgcgtgatgagttgctttaaaagctccataaagacctcttttctttacggcgaagatcagtcgtggatttcggcgacctcaccggcctttttatagatgtggttcgcgggcacgaagccgcgcaccatggaaagcggatagacgcgtgcgtttttgccgacgaccgtgccgggattcaaaacgctgccgcagccgatttcggcgtggtcgcccagcatggcgccgaatttgcgcatgccggtctctacgcgttcgccgtcctttaagacggtgacgttcgagtgatcctgctttaagttcgacgtgacggcacccgcgccggtgtgggccttatgacccatgacggaatcgccgatgtagttatagtgcggggcctgcgcgccgtcgaacaggatggcgtttttcacctcggtggaattgccgacgacgcagcctgcgccgatgagcgcgttgccgcggataaatgcgccggggcgcacctcggtctccggcccgatgatagtggggcctgcaatgtagacgtttgggtaaagcttggcgcttttcgcgacccacacgtcttcaccgcgctgctcgtattcttcgggcggaagtgttttgccgagcgctttaatgaactcgccgatcttcggcagcgcctcccacgggtaggtgcaggcttcaagcagcgggcgcgctgcggtgtagctgagatcgtataaggcgcggacggtcaattcttcatgttttacgttcatattcatgttcctttcttgactcaatcgtactgaaattccgactctgcggaacggacttgcgactttcccataaaacccattttatatagtataatacaactccccgcacatttccagtctgtgcggggagaattcaggttttcttaacttttttgtatgtttacaggtgctctaaggtgcggatggcggcttccatgtagatctcgccggcatccgtgccgagcttatttaagttgcgggcgtcccatttttcgccggaaagggaatctgccgcccacatgaactgggcgaatttgacgtttcggaacgccgcgacggtcgccatggcggcacattccatctcgacgacggagcagccttgctttaaacgcttttcaaccttgccgcgcgtctcacgaaagaatgcgtcggtcgtccacgttttcacgcgggcatagggggcgtccatgtcttcgagcgtttggcagacggcatctacacaggcaggctcgagtacggcttcctcggcgggcggggcgtagtggtagctggtgccctcatcgcgcacggcggcgtagggtaccagaatgtgcccggcggtgatggcgtgatcgagtgcaccgcaggagccgagcatcaaaaactttttcacgccgtgggggatcatctcttccatgatgccgcaggcagacggcgcgccgacgcgcatgcacatcagcgcaaacgcggtgctgttcggcgcagtgcagcgatagaccggttctccaccgttgcagtcctgatattgcatgatgacttcgccgtgaaattccgccgcgtatttctccgtaagcgggcgggagaacacgccgatgagtgcctccggcatattttccatcgggtgatagaattcgctcggctcaatgacggctgttttctcagggtcaaaatctgtgtggatcatggaattccctccttcgttttcgcaaacggtaaattttatctattataccacggggaggctttttgtcaagcaaaggcttaaatttaccaaaatattttataattatattgaaaagttgtgcgggatacgctataatagttgcaaatacaactattgagagcttcttaggggaaagagggcatgtaatttgaaaagactggcggtgtatttaaaaccgtttttgccgcgcatgggcgtgggcatcagctttaaggcggtcggtacgcttgtggagctcgcgattccgtggattttgtcgtatatcattgacgatctgatcccgctgaaagaaattcgcccggtatgtctgtggggtggattgatgatcgtgtgctcgcttattgcgtggggcggcaacatcacggcgaaccgtatggcgtccgctgtggcgcgcgactgcacgcggcagatccggcacgacctgtttcaaaagatctcgtatctttcggaaagcagggtggatgcgttcacaattccgtcgcttatttcgcgtatgacgagcgatacatacgttttgcaccagacggtcggcatgatccagcgcatcggcatccgtgcgccgctgctgcttttcggcggcatcatcgtatccttgacgatggatccgatgctgacgctcattatggtggcgtccttgcccattgtgggcgtaattgtattttacgtctcgcgaaaaggtgcgaagctttttaagattgtgcagaaggcttccgattccatgctgcgcgtggtgcgtgaaaacgccgtgggcgtgcgcgtcatcaaggcgctttccaaatcggactatgagcgtgcgcggtttaaaaaggtgaacgacgacctcaccgaaaaggagcgcacagcagagagcaccatggcgctcatcaatccggtgatgagccttttgctgaacctcggcattgtggcggtcatcacggtgggcgcggtgcgcgtgaacaacggcacctccgagatcggcaagatcatcgcgtttatgaatttatacaccatcgttttgaacgctttaatggcgattaaccgcattttcatgatgctttcacgcgcatcggcttcctctgcgcgtgtattggaggtgctggacacgccggtggagcttttcgagactgagccgcacttcagctttttgccgaaggacgcgccgcatgtggagtttgaccacgtgacgttccgctatgcgcgcggcagctttgcggtgcggaacatcgattttgcgttgaagcgcggcgagacgctcggcatcatcggcgcgacaggcgcgggtaaatcgacgattattcgtttactcatgcgttactacgacgtttcggagggctccgtgaaaatagacggcgtggatatccgcgactacgcgacgtccgatttacgcgcgaagttcggcgtggtattccaaaacgacacgctatttaaggacacgatacgcgagaatatccgcttagggcgaaacctgacggacgagcagcttttggaagcggcacgccgtgcacaggcgctggaatttatggaagaacagggcggcctggacgcgccggtcgccattaagggcgcgaacctttcgggtgggcagaaacagagactgttgcttgcgcgcgcgttggcgggcgacccggacattttgctgttggacgactcctcgagcgcgctcgattacaagacggactcgaagctgcgtgaagaaattcgcctgcattgtgcggacgcgacaaagatcatcattgcgcagcgcatcagctccatcatgcatgcggaaaaaatcatggtgctcgaaaacggcaatgtcatcggcatgggtacacacgaagaattgatggagacctgcccgctttaccgcgagatcggggagtcgcagatcggcgagggactcgcaaaggaggtgcacgcatgaaaaggccggaaaccgtgcaaacggaaaaacacgaaaagcccaaaatgaaaaaaacggcggtgctgtcgcgccttttgccgtatttgatgcgctacaaatttttgatgctcggggcgattttactgacggtcggcggcaatttgctgtcactggcgggaccgtacatttcgggtcttgcggtggatgcgatggaactcggccgcggcaaagtcaattttgaaaaggtgggccgctacggcgttctgatggttgtgatgtacgcgatatccgcagcactttcatatgcgctgacgcgccttatgattgtcatcagccgccgcgtagtgaacacgatgcggcacgatgtgttccaaaagctgagcgagctgcccgtggggtacttcgatacacaccagacgggcgacattttgagccgtatttcgtatgacatcgacaccatcaacacctcgcttacgaatgatatggtgcaggtgttcgcgagcgccgtcacggtcatcggcgcgctcatcatgatgctttccatttcgccgacgcttgtgttggtgtttgttttcactgtgccgctttcgatgttcatgacgaagaagatcacgggctttacgcggccactgttccgcaagcgctctgcaaagctgggcgagctgaacggctttgtggaggaaatgatcagcgggcagaaaacgctgcgcgcgtatagccaagaagaaaacaccattaagaagctcgataaacagaacgacgagaccgtggacgcgtactaccgcgccgattattacggcagcatggtgggaccctccgtcaacttcgtcaacaacctttcgctttcactcgtcagctttttcggcgcactgctgtttttgggcgggtcaatctctatcggcaacatttcgagctttgtactgtactcccgcaagttcagcgggccgatcaacgaaatcgcgaacatcatcggcgaattgcagtcggcgttttcggcggcggagcgcgtgttccgcttactggatgaagagcccgaggtcgcggacagtccgaatgccgaaggccttaccgaagctgagggtgacgtagacctttcgcacgtgaacttcggctacacaaaggacagacagatcatcaaagatctctcgctgcatgtgccgaagggcgcgcttgtggccattgtgggcccgacgggcgcgggcaaaacgaccatcatcaatttgctgatgcgcttttacgatgtggacagcggagagattacgcttgaccataagccgatcaaagacctgacgcgccgcagtttgcgcctcaattactccatggtcttgcaggacacatggctttttacgggcacggtgtatgaaaacatcgcctacggcagcgaaaaggcgacgcgcgaagacgtggagcgcgtgtgcaaggcgtgcggcatccatgactacatcaggacgctgccggccggttacgaaacggtgctcgaggacgacggcgcgaatatctcaaagggacaaaagcagctgatgaccattgcacgcgcgatgctgctggagtcgtccctgctcattctggacgaggcgacctcaaacgtcgatacgcgcacggagctgcgcatacaaaaggccatgcgtacgctgatggcggacaagacctgctttgtcattgcgcaccgcttatcgaccattcgcaacgcggatatgatcttagtcgtgcgcgacggcgagattgtggagcgcggcacgcatgaaagcttgatgcagggcgacacattctaccgacatttgtataacgcacagttcgcgtaaaaacgcagaaacggggactgttatgagacgtatacggagaacattgccccacgcggcgtggatgtgaaagaaattcaggctgcaaaggcgcgtgaaacgtgaaatgcggacccaaaaattttaagaaaatactaagttgaaaccgcttgaaaaaattcattttcggtcttataatcatgctgaatacgcagttctgagaaactgcgagcaggagaccgggggtggaggacatcaggcggtttttacatacgctgtgcggattgtttgaaaagggaacgcgcattcggggtattttggggtgctttctcggcggattatttttgaatatcgtcatagaactgatggacaggcagagtctttccgctgttttggtgctgctcgaatcgcatccgctggcatttttggaaaacgtgctgattttgacgttttccctttcgctgtgcctgttttccaagcgacggtggtttttcggcattttgatcggcacggtgtggcttggacttggcattgcgaatttatatgtgctcagctaccgcgtttcgccgctttccgccattgattttgcgattttgcagctcgattggtcgtttatcggcatttacatgagcgtaccggcatttattttgcttgttattgcggtgattttgctgcttgcggggcttgtgatgctttttaaaaagtgcccgaaaagcccggtgcaccggctctttaacacggcggtgagcgtgatactcctttgcgcgtgcattgtcattccgtatctgccgacgtccttaggcttcggtgagaatacatatacggatgttatccgtttgacagagaattacggctttacgtacacgtttacgcgcagtctcgttgacacgggtatcgaccggccggaggattactccgcccgccgcgtgcgcgccattgcagcggaggtgctgcgcacaaaggacaaagcgcccgaggacgtgccgaacatcatctttttgcagctggagtcgtttttcgacgtgaaccgcttaaaagacgtgacgttctccgaaaacccagtgccgtattttgaagagctgaaggagacatgccccagcgggtatttcaccgcgccgtccgtcggcgcgggcacggcgaacacggaatttgaggtcatcacgcagatgaatgtgcaggacttcggcacgggcgaatatccgtacaagacgattttgcaggaaacgccgtgcgagtccatcgcgtatgacttaaaaaaacttgggctcgcgtcgcacgtcattcacaataacacggcgacgttctatgaccgcaacatcgtgttcccgaagctcgggttcgattcattcacgacgcttgaatacatgaaccacgtggagacaaacgaaatcggctgggcgaaggataagattctgacaaaagagattgtgcgggcgctttccgaaacgaaggaacgcgaccttatttacaccatttcggtgcagccgcacggcgcgtatccggaggagagcgagacggcggatatcaaagtgctttccggcatagaagaccccgctttgcgcggacaaatggaatattacgcgacgcagattcacgaggtggatgaatttctgcgcacgttgaccgatgtgctgacgacgtgggaggagccgaccgttttggtgctgtacggcgaccacatgccgtcgctggagatcagcaaggatatgctggacctttctgcgggcggcctgtttgaaacggagtacgtcatttggagcaactgcggcgtggggggcgcggatagaaacgtgaaggcgtatcagctttcgtcccgtgttttggagcttttagacatcaacgtaggcacactgacgaaattccaccagttaaacccgtggcgcggtgcatacgaaacggagctgcgcacgctgcaatacgacatgctgtacggcgaccgtgtggtgtaccacggcgagcagccgtttgaggagaccgacatgcgcttcggcacgcgggacatcaccgtgaacacggcgtatgtgcagaacgatatgctgatggtgcgcggcaaaaatttcacgccgtacagcgtgatttacgtggacggcaacgcgaaggagacgacgttcctgtccgaatacgccgtgacctgtgcggcggacgacatagaaaaaggcgaccgtgtgacggtgcggcaggtggcggaggacggcacggagctttcggaagccattgccgacccgtacggggattaaatcggagggaaacgtgacagcgtactatcatttgcccggcttatttgaatttttcgagctgtacagtgtgtttttgccgctgtacggagcgcacagagaatatttttacgagtggtgcgagatcgcgtctgtttacggcgcgccggcggactgcctttggggcggcggacgcctcggcgacggcgagcacgacccgcgcgcggtactctcgctcatgcaggaatataacatctccgcgcggctgacgttcagcaattctttgttggaggaaaagcatttatctgacccgaagtgtaacacgctgtgtaagctgtttgcggagagcgaaagcccgcaaaacggcgtgatcgtgcattccgatttactgttagactatttaaaaaagacgtacccggggttgtattttgtttcgtctacgacgaaggtgctgacggactttgaagactttaaacgggagctcgaacgcgaagattttcggtttgtcgtgccggattttcggctgaataaacaagttgaaaagctgaacgcgctgccgcaggcgctgaaggacaaggcggagtttctctgcaacgagtgctgctctttcggctgcaaagaccgcaaagcgtgttatgaagcggtgagccgcaaaaacctcggtatagacggcccggagcacgtctgcaccgtgccgaatgcaaaggagggctaccgcttttcaaaggcgatggagaacccgggttttatcggtgttgcagatatacagaacgtatatctgccgatgggcttcacgaactttaaaattgagggtaggggactcggcagtgcgctcattttggaatttctgctttactacatgacaaagccggaataccggctgcgcgtgcgggaagaaatatatttagacaacatgctcgatctgttttgaagaaagcacggtttgcggcaaatttcgctgcgggccgtttctttttctcagcttctgtgctataatgacggaaacgagaaacatgagggaaagggtgttcatttatggatctggaacgaatcgaaaaagcggtgcgggaaattctgctggctgttggagaagacccggagcgcgagggcctgcaggaaacgccgaaccgtgtggcacgcatgtatgcggagattttctcggggttaaaatccgacccgaagcagcatctcaaaattttccacgaagagggcgagcacgacgagctcgtttttgtgcgggacattccgctttactccgtatgtgagcaccatttgctgccgttcatcggcaagtgccatattgcgtatatcccgcgcgacggcaagatcatcgggctttccaaatttgcccgtattgtcgattgctttgcgcggcgtccgcaggtgcaggagcgtctgacggcgcagattgcggactttatcgaagaaaacctgaatccgcgcggcgtggcggtgttcattgaagcggagcacctgtgcatgacgatgcgcggcgcgcgtgcggcgggcgctttgacgcagacctctgccttgcgcggctgcatgcgtacggaagcgaagacccgcaacgaggtcatgctgctgctcgcaaagtaaggagaccgatatgacggaattttacgcggcgggaaaacactttccgctgaacagaacctatgtgatgggcattttgaacgtgacgccggattcgttttccgacggcggcaagtattttgaccccgaaaaagcggtgcgccacgcggtagagatggaagcgcagggcgtggacattgtggacatcggcgggcagtccacccgcccgggcagcgtgcgcatctcacccgaagaagaatgggcgcgcattgaaaacgtggtgaaggcagttgcggagaagacgaatcttgctgtttccatcgacacgttttaccccgaggtggcagaaaaagccctcaaagccggcgcacatatcatcaacgacgtgacgggttttgcaccggaaatgtggcgcgcggtggaaaacaccgactgcggctgcatcgtgatgcaccccggcgatccggatgacctgaacggcgcgggcggcgacattttggaacgcgttcgggcatttttcgagaagaaaacgacggaagcggaacagcgtggcgtcaataaaaatcgcctttgcttcgacccgggcatcggctttggcaagacaaatgaggaaaatttcgcgcttatcgcaaatccggagaaaatccgcgtgccgggtacggcacttttgatggcgacgtcgagaaaacgcgttatcggtgctgtttgcggcaacccgccgtttgaagaccgcatggcgggcacggtggcggcacatacggcatcggtgctgttcggcgcagacatggtgcgcgcgcacgatacgtttgaagcggtgcaggcggcgcgcgtagcggacgcgataaagcaattcagaaagtgagtataaaatggaaacaatacgcattaagggccttgagatatttgcctaccacggcgtgaacccggaggaaaaggaaaacggccagaagtttattttagacattgcaatgcaggcggacatttcccgcgcggcgcagacagatgacctcaacgagactgtgaactacgccgccgtgcgcaaaacggtgaacgcggtgttcacggcgcagaaatatgatctcattgagcgcgcggcgcaggtggtatgcgatgcgattttggagaactacccgaaggtgcagagcgtgacggtggagctgaaaaagccggaagcgcccatcaacgcggtgttcgattacgtctcggtcgaaatgacaaggagccgtgcatgaagcgcgtcgtcttggggctcggcacaaatttaggcgaccgccgggaaaatctgcgcgcagcgctcgcggcgctttcgcatttgccgaaaacggaggtcgaaaatgtttcctccgtttggcagaccgcgccgtttgatgtgccggacgagcaacaggactattggaatatctgcgttttgctgaaaacggagctttcgccaagcgcggtgctcggcgcgtgcctcggtatagaggcagcgatggggcgcgtgcgggaaatttaccacggtgcacggtgcatggacttagatgttttgctgtacgagggcttcacacagcgcgaaaaggagctcaatgtgccgcaccccggcattttggagcgcgcgttcgtgctgttcccgcttttggaactgtttccggaaaagaatgcgttcggcttcgattttgcggacgcaccgggctttaaagacggggacgacgtgcagcgcgtcggcgcggcgaaagaaatcttggattgatatttctaatgcagaaaattgaggaagctaagtgcttcccttttttcttttgaaatgtaaactttccgtgtctgattacagaaagatttcaaaaagccttgaaaaagttaccgaattgtaatatattataagggtagagtttttttaggactcttgatttttgtgaaaacacggagttaatcgatatgaagatgaagaaaaaaagcttgcgttttgtggccggtgtgctggcggtgacgatgctcatttcctccaactcggtctttgcgaccacgacggcagaatacgatgagcagattgaatccattaaatcacagcaggcggaaaatgaagccgaggccgagcgccttaacgaaaaacttgattcgctgcgcgaccagacgagtgaagccgaagcatatcaggcaacgctcgaagagcagatcacgacgtaccagacgagcatcgaccttgcggtgcagaacattacgcagctcaatacgaacatcacgaacctcgaagccgagattaaaaaggcggacgaggaatatgccgatacatttgcggaattgaaagtccgtttgcgctcgctgtatgcttccggcggcaacctgacgacgctgcagatcttatttgattccacgagcctttacgatttttccatgcgctccgaggcaatgaagaccatcacgaagcacgaccgcgagctgatggagaaaatccgcctttaccgcattcagacgcaggatcagcgcgatgagctcaacaaagaaaaagaagagcttgccgaccagaagaaagaccttgaaaagaagcaggaagaattgcaggcgctcgaggaagaaaaccagaagctcatcgacgagctgaatgtccagagcagcgagacggaaagcgatttggcggcggccgaggcggcgaaggaagattacgtttcgcagcttgaccagcttattgcagaccgaaacgcgcaggccgaaaaggaagaggaagcacgccgtcaggcagaagcgaaccagaatgccgcgaacaacaactccggcagcggcaacacgtcttccggctcgggtaacacgagcgatgttttgaacaccggcgacctttcattcagttggccgcttgcgggctacggctacggcagcatcacacagtatttcggcggcatgttcagtggctcgccgcacggcggtgtggacatcggcgttccgtacggtacccccatttacgcggcggaatccggccaggtcatctctgcggagtaccactggtcctggggcaataacgtgctcatctggcacaacggtacatattccacgcgctacgcgcattgcagctcgcttgcggtttccgcaggcgaatatgtggaaaagggccagatcgtcggctatgtcggctccacaggtcagtccacgggcaaccacctccactttgaggtctaccagaacggcacgcgcgttgacccgctgaatttcgtgtaagatagcttataaaatgataaacactccaaaaagttggttttaaccgctttttggagtgtttttttatgtggcgcagggttttagagagttacaaagaagtgcctgtttgtgcgggtaaaaacggtcggttataataaatccgaagaaaggcggaaagccgaaacggaaggggattttccacatgaacgaagtcataggctcacaattttaccgctcaagtttttatagaagaggaaatgtctcgggtgcaaacggcgtttcatggaagacgatgcgccacgtgatcttcttcggaggcgcaaaatgcagcgccgagcaggcggtcagcacggttttgtcttcgctttttgccgtgacaaacagcgccgtgggtccgtctgcgccaccgatgatgccgataacggcagcgttttgcgcttcgggcatgaacgggtagtccttgggcgcttcgcgctcaacaggcggatcgttctgcgcgcagtcctcaacggagatgaggtttttcggcggggcaggcgagaccgtataggtcattgcggtaaatcgatttggaaaatcgaaacgcgcgtcggaaaaagcgtttttcggcagcgtctgcggctccaaattctgagccgtcagcgtgtacggtatgccgttatgggaaaacgcaaatatgtcgccgggcttttgaacttcaaactccgcgccgggcacgcacacgggctgcggggtcagcgtcaacgcgaacgacgaaatgcttttcgggcggcgcttcgtcttccacgggaacgaatagcggtggatcgcccagccgtcttcaggggttagcccgtagtggtcgatgatcgcgcgctcggtgggcgtgtcaaaatcgctttcgccgtgttcgtcgagtgcaggttcacaagccgcagcgttttgaaacagcgggtggtacgaaagcccgtgaccctgcgaaaacgggagcgtctgtccgttcagctcaatttgcggcgaaaactcaaaagccagcggattttcgcgctccgcctgttcgaatacatcgttcggcacgtcttcatcttcaaggtgctcccattttttacagaaatcttcgagcaccgctttatcagcgcgcatgagaatgtcgagcacaagtccttttgcggtaaggtacgccgcgggcacgtaccaatcgcgtcccgcaaagcggaacttttgatttagcttgagcacctgcccggggtggctgccgtccgggcttttgccgccgaagctgccgttaaagtagactttccacacgtctttcatggttattcctccatttcctttttcgcccagtcggcatccttgaaaatcgcgcggcctacgccgatgaggtcggcggcgccttcctcaagcagtgcttcggcttcgttcgcctttgtcacgccgcccgtcagaatgaccggcacatgcacggcttcgcgaatcgcggaggaagcgtccgaaaagaaaccggggtcctttcggtttttcaccgtaaagccgttgaagccgccggaaatatcgagcaggtcaacaccggctttctcaaactttttgcaggcatacaccgcgtcgtcaatggtcgcgccgccctcggtgtagtcgctcgcgccgagacgcagggcaacgaggtaatccgcacccacggcttcgcgcaccgcgcggatgacgtccaaaagcaggtgaatgcgcccgtcgaggtcgccgccgtaagcatccgtgcgcttgttgccgagcggggagtagaactggtcaaggagatacccgtgtgccgcatgaatttctacgccgtcaaacccggcttcttttacgcgcagcgcggcttcggcaaacttttttgcaacggtgtgcatgtcgtccgcggtcatttcgcgcacgggcttttcgcttttgcgtgcatactccggctgtgccgtgacgctcgcactgattgccggatagccggtgatttcctccattgccgcgctgcccgcgtggttgatctgcgcgatgacgtgggtgttgtttttatggatggtctccacaagctttgtaaggcccggaatatcggtgtcgcgtgaaacggagagctggccctcgtgtgccttgccctcggggctgatgtaagcgtgttcggtgacgatgagtccgatgcagccgcccttggagcgcgcgtcgtagtatgcgagcaggtcgtcctgcacggtaccgtccggtgttttgccggtcgccatcggcggcatgacaaggcggtttgcgagcttcacattatggacggtgagcggggtgtgcagcagtttgttcatggtgaaaattcctttccgtttggtttttaaagcgatgctgttttatttgatatcatgcagaaattacttttggtgcagtgtactgaggatgagcacagtatatcacagtggttttcaactttccagatataaagcatgaaaaaacggcttttggacatactgaaagcgtattgcaaaacagaaaggatgaaaacgatgaaaatacaaaaggttctggcgacggaaattctcgattcccgcggcacgccgaccgtcggcgcaacggtcatcttgagcgacggctccgtcggcacggcgaacgcgccctccggcgcatcgacgggtaaatttgaagcgcacgaaaagcgcgataatgaccgcaagcgctatctcgggcgcggcgtaaaaaaagccgtggagggcattgaggaaaccgttgccccggtgctcgaaaatatgcagcgcgtgacggtgcaaaacgtcgacagaatgctcatcgagcttgacaacaccaaaaacaaagaaaagctcggcgcaaacgccacattggcggtgtcgctcgctgctgcaaaggcgctcgccgcgcactataaacaaccgtttttccgctacctcggcggcacgaacgcacagaagcttcccgtgccgatgatgaacattttaaacggcggcgcgcacgcggcgaataacgtggatattcaggagttcatgattgtgcccgtgggcgcaaaatcgttttcggaggccgtgcgcatgggcagtgagatctaccacacgctcggcggcattttgaagcagcgcggtcttgcggtctccgtgggcgatgagggcggcttcgcgccgaacctcgcaagcgacgaagaagcgatagaggtcattttggaggccgtttcgagcgcgggctacacgacggacgaggtgaagattgcgcttgacgcggctgcaagcgaatggacggcgaacgacggctatcttttaccgaagcgcggcacaaaatacacctccgcgcagctcattgcgtattgggaaaagctgtgcgaaaagtaccccgtctgctctattgaagacccgctcggcgaagaggattggcccgcgtggacaaccgttaccgaaaagctcggcaaaaaaatcatgcttgtcggcgatgacctgttcgttacgaattcgacacgaattcgcgagggcatcgggcgcaaggccgcaaacgcactgcttgtaaagccgaaccagatcggcacgctgacggaaacgctcgccgccgtggagcttgcaaaggagaacggcatgaagatcgtcatgtcgcatcgctcgggcgaaacggaggacacaagcatcgcggatattgccgttgccgtaaacgcagggttcatcaaatccggcgcgccgtgccgtagcgaccgcacagcaaaatacaaccgcctgctgcgcattgcaaaggaaaatgaaatggacgaaatgtacggtacaggcaaataaaaaagggtatctcggttttcgccgagatacccttttaagttcagaaaaggtttaccaatccagaccggagaacttgtggaagctgtccatgctgatgcggacgctttccatctgggtcagctgggtgtgatcctgctcaagcacaatgtactctgcgccaagctcgttgcccttgttgatgatggactggatgtccatgatgccggtgccgatttcgcagaaatccttgtggtcggaacccttgccgaagctgtcccacgtgacgagcacgttcgggtcgttgacggtccacaggttgatcggggaatcggaggtcttggagaaatccttctggtgaatgagcttcaggcggtcgccgaggcggtccataacagccagcggatccatgccgccacgcattgcccagaacgtatcaagctcaaagctgacgtagttcgggtcggtattgtccatgatgtggaacagaatttccttaccgttcagcttctggaactcgtggtagtggttgtggatgagaaacttgatgccgtgctcggagagctttttgcccgcccagttgtaatattcgcagcgctccatcagctggtcgtagccggtgtagaaatctgcggactggccgaggtacttcgtgcccacctgcgtgtggtacgcgatcatcgggtcgatggtctcctcattgatggggcggatgtggccgctgatgaggtttgcgccggtttcttttaaaagcttctgcatgtcctcaacgctgacgccgaagcctacgcccgggtctgtatctgcgttggagcttgcaaactcaaggttcttataaccaatctctgcgacctggcggatcgcgttgatcgggtcttttttcatttcgtcgcgcacggagtaaagctgaatgccgactttaagtgccataataggttcaatcctttcttgtccgtttgcctgctgtgcaggtcatttcactataattgtactgcgtttttactctgccgtcaagcgtccgaaacgggagatatgcgtgcaaaatgtgaattaggaaagttacaagacggtatcctgcgtattttcgggtcagagggggaagaagcaaatgtgaatgaagtttttcgcctttttgaagacaattttaaaaaattacaaaattgtaatttggtacgccgttacagtgtacaactcgaaaattatttgattaaaagataaacatgatttaacaattaaaacaaaagtacgtttatattatttcaacttgcacatgaaaatgaaattgccctaaatctatagaaatgactgaacaaaaagtattcctgcaaaatttccgaaatttttgaaaaaaccagtgaaatacagttgaataactgcaagagttgtgaaagcggtttcataaattttgcgaatttagcaatttgttgtcttttgaaaacgcatgaagaatatggaaccgcttacacaaacttgtatggagtggaaatcgagatcaaaaaaaattaggcaagatgcacaaaccgaaaatcaatgacaaatttgggtaaaaaactgagtataggctatttttgttgttgacattcacaaaagagggtgataaaatcacaaatgcaaacaaaatgatataccgtgtttttgtaagatgcaccaaatacaaagcaaatcgtttaacttgttttgttcgtgtctctttttctatggcagcggttccacagaaaaggggacaagtttcggtatgtttcagcgtcacgggggaaacctgttattcggatgttgcctcgggcaaaaacagccttgtgttttcttattgaaagcgcggtcatcacaatatttttaggaggttataccgtatggcagcagcagctaaaccggcaaagccggcgtatgagctgagcggctgggagcgctttaaaaaagatgttgtccgcgacaagtggctgtatcttctgattcttcccggcatgcttttcatgctcatcttccgctatatcccgatcttcggcaatgtgattgcttttatggacttcaacccctacaacatgtggaacagcacatgggtaggctttgaccagttcatcaagcttttcaataagccggcgttcatgcagactttctacaacaccctctacatctccattttgaagatggtatgtggcttcccgattccgatcatcctcgctttgatgatgaacgagatgcgcaacatgaagttcaagaaagtggcgcagacgctcctttatctgccgcacttcatttcttgggttgttatggccggcctcatcatgaatttcctcgatccgtccacgggcctcgtcaccgcgctcctcaagagcatcacgggcaaggacctgcaggtgcttaccgacaagacgctcttcgtcccgatgctgattatcaccgacatctataagacgatgggctggggcacgattatttacttcgcggcgctgtccggtgttgacccgcagctttacgaagcagccgagattgacggtgcacgcaagtggaagcagatgattaacatcacgctgccggcgattaccccgacgattgttatcatgctgatcctcaactgcaacaacatcgtaaacgcaggcttcgaccagatcttcatgctgtattccgcactggtttatgacgtagccgatatcatcgatacgtatgtgtaccgtatcggtatccagaaggcagactactccttctctaccgcagcgggcatgttcaaatccatcatcgctctcgtcatgatcctcatcgtcaactttgttgccaagaagaccggcaacgagggtatttggtaaggaggttatgaacatggaaaagaacaaaatcaaaacctccacaggcgaaaagatctttaccgtattcaactacgcgttctttacgctgctctgcctcgtcatgctgtatccgttctggcatgagatcatgctttccttcagctcccttgaagcatccatgaagggcggcatcttcctctggccgaagggctttaacctggatacttataaatccgtatttaaaaacccgaacatctacacgggcttccgtaccacgatcatcgtcacgattgccggtacggcactgggcacgctgctcaccgctatgaccgcttatccgctttctaagtccagactgcgcggcggcaaagtgttgatgacgcttgtcctcttcaccatgattttctccgccggtatgattccgagcttcctgctcattcagacaatcggctttatggataacatcctcgcgctgatcctgccgggtctcgtaagcgcatacaactgcatcatcatgaagagcttcttcctttccattccggaaagccttgaagaatctgcccgcatcgacggtgcaaccgacctgcgcatcttcttctccatcatcctgccgctttccaaggcgaccatcgccaccatcgcgctgttcacagcggttggctactggaacgactatttctccacggtcctttatatccgctccgttgataagtgggctctgcaggcggttctgcgcaacatgctgacgaatacacagcaggcaatgcagcaggcaggcgtcaacgtcatggcgcagacgaataccaacgcacagacgatcaaggccggtaccatcgtggtttccacggtgccgatcctcatcgtgtatccgttcgtgcagaagtacttcgttaagggtgttatgatcggcggcgttaagggctaagcccgcactcttttgggttgtcccgaagcatggcttcggaaaactatattatcattatttccaaagaaaggattttagtcatgaacatgaagaaaatcgcatccgttgttctggcacttgcactgagcgtaagcgtatttgcagcgtgcggcagcaacggcaattcttccgcaagctctacggcttccaccgagagcagcactgcttctaccgacagcagcactgcttctaccgacagcagcgcagctgcgaccggcgacaagatcgacgttctgaaccagagcgaaacgatggacgtttccgttgcagttatgaccggcttcaccgcagctgacagccgcgttcagaaggagcttgaggaaaagtacaacgttaagttcaatctcgttgttctcccgggttgggctgacggccagtcccagatctccctgctgatggcatccaacgacatgccgaacatcatgtggtggtggaccatggataccgagtacaacaagtgggtgaaggcaggtctgttggacgatgtctccgcttacatggataagtacaccgttatccgcgactactacaacaagatggacccgaagaccctcttctatgcatctgaggccgacggctccatttacagaatcccgggcgacgttgctgaaccgtcctgcgagaacctctggatccgccaggattggctcgataacctgaatcttaaggctccgaccacgatcgaagagctcaacgaagtgctccgtgctttcacggaggacgatccggacggcaacggtcagaacgacacctacggcctcggcggcgacggttacgacttccgttccttctggccgtggatccagtcctatgaccagacccattacagccgtttctgcgtagatgacaacggcgttgtcacctacggcccggctaacgagggcaccaagaactgggttagcgacgttgctgatctgtatgcaaagggctacatcaccccgaacatcacgcaggataccgaccgtgacgagcagatggcaaacggcggcttcggcgtaacgtacagctggtgcgcatggaacaacccggacgcagctccgatgatgtccttctatgcttccaacccggatgctaagtgggtaccgatcgacatggtcaagggctccaacggcaacccgcaggaagacccggctacaagcgctgcttgggcatatttcgcaatcaccaacacagcttccgatccggaaagactgtatgcaacttgggacgacatgtgcgattccgataactacatcgcacgccgcttcggtatcgaaggcaccgattacaagtacgacgagaacggccagtatgtcgctatcgttggcccggactccgaggagaacacctctaagaatatcggcctcaagctgttcgataacctcatgaaccgtaaggacgagtgcaacatctccaatactccggagactaccgctctgttcaaaaagtccggcgaaaacagccgctatgctgctgctcacctcgttgagtggaaggatccggcttccttcgagtcctggaccgagtgcagcgctgacatcgaggctgagaaggatcagtacctctggggtgtcatcgccggtcaggaatccatcgacgattgggacaactatgttgcaacgctgaacagcctcggcctcgaggacgttcttgctgaagcaaacgaggactatgcaacgctcagcgctcagatggaagagtacctcgctgctcacggcgaagcgtaatcgattgatccgatctcgattaaaatgtatacagatgggggaagctttcgggcttctcccattttgtttcttatgcaaaaatagaccgcgaaaaaactgtgtatgtttgcaagaaaatgtgcgtttttttctctatatgaaatttgcaaaaagctattgaattctcgctttgcatcggctacaatgcaaagaaaggcaaatatacgcctgtgcaaataccccgaaggagttgtaaaaaatgagcaaactgtctcttgccggcgcgtggaagctgcgcggcgaatttatggacgttacggcagagcgctacaacgaagtgctgcgtaaaatggacgcagcccccgtgcgcgcaacgctgccggcgttcttaaagcttgaagacctttccgaagaagaacaggcagagttcttaaaagacccgaacccgcattttcacgtgatgacggataaagcgaatcatgcgttcccttctaaatacggctttatccccatgaccgtgccgggcgacgtcaccacctccctcatcgaaaacggcatcgtaggagaaccttttttgaaggaaaacacaaagaaaaaccagtggatcaaggatctttcctggtggctcgtccgcgattttgacgtcacagaggagatgctgaacgaagacatcgtgcgcctcaacattgaaatgctcgatttcaatgcggatatcatcgtaaacggcatgcccgccgcgcaccacgaaaacgcgttctgcgcgttcagcgaagacatcaagcgctttttgcacgtcggcaaaaaccagctcgtcattcgcctcacctccggcatggagctgcactatccgcgcgacgccgtttcgttctactgcgcaagtgaaaacgccatctgtgaccagcgtgtctacacccgcaagccgcagtttacctacggctgggactggtgccagcccgtgcccacctgcggcatcggccgctccatcgagattgaagcgttcagcggtgcgcaggtcatcgcgtcccgcgtcgatacgttaaagctcgacggcgatgacgccgaagtggagttccacttcgaaatcgaaaaatccgacatggtctcaagcgccgagtgcgagcttacctatacgctcgaatttgaaggcaaaaccgtttacaccggcaaaaagacgctcatgctcgtcggcggcgtgaacttcgccgaggaacgcgtcacaatcaaaaacgcgaagctctggtggccgaacggctacggtgcgcagaacctctatacctttaaagcctgctgcgtcacaaagggcatcctgcacgagatgcagccgaagaagatcggcatccgtaccttggagctcgatacctctaagctcgaagacggcagccgcaacttcttctttaaggtgaacggcgtgcgcatcttctgcaagggcggcaactgggtgccgacggattccctttatctgcgcaccccgaaggaaagctacgaaaccctcgtgcgcgagggcgctgcggcgcacttcaccatgttccgcatgtggggcggcggcacgtatgagccggactgcttctatgaatattgctcggagtacggcattttgctgatgcacgactttatgtacgcttgcgcgttctaccccgaccacaaaaacgatttcctctttgaggcggagcgcgaagccgagtaccagacaaagcgccttgcacattatccctgcatggccatctggacgggcaacaacgagattgcggaatcctacaccgattggttcccggcgcccatcaagccggagcgcttctacggcgagaaaatattcaactatattcagccgcgtgccgtgcaccgcaacagcccgctcgttccgtatatgccgtcctcgccgtacttcggcgaccgcgccaacgagagcgaacagggcgacgtgcacgcatggtcgttcttcggccgtcacccgaaaacgaagttcaagtttgtctatgagcttgaggcattcgaccgcatcccggcgcgtttctccagtgaatacggcttcttcggtgcacagatggaaagcactgttcgccgttacctcgacggcaccgaaatgcgcttcgataaccccatctggaagcaccacggcgagtttgaccgcaagcgcagcaacatcgacggcgcgattgaccgtcatttgacggagttcaaaaccctcgatgaacacggctatctgctgtacagcggcatcatgcagggccttctgtacgccgagcttgccgaagccatgcgccgcaagccgtacggcgcaggcgacctcatctggatgtacaacgattgctggccggagacaggttggacgatcatcgattattacctgacgagaaagatctcgttctatttcttaaagcgcgcgtttgcaacgaaaaagctcatcatccgcgcgtgtgagggcggcgcagaagtgaccgtcatcaacgaaacgcccgaagcgttcacggcggatattcactgcggctatatgaccttcaccggcgagaccgacagtctctgcacaaagacgctcaaggtcgctccgcactccatgcagcagttccacatttccgtctgcaatgatttgaagcacggcttcttctttgcaagcgccgagggcttcgacaccgccgacagcctgcgtgcgtattaccgcgattacgtcttcccggaaagcgacgcaaagattgaaaaggtggagcaggacggcaacgatctgctcgtgacgatccgcgcgagcgtgtacacgccgtttgcgtacctcatgacgagtgacgaccgcgtgcattacgatgataactacgttacgctctacccgaacgagccgaagacgctccgtgtggaaaactgcacggaaacgcctgtgctgcacgttgccgcacccgccccgagcgaagaaacgaaaaaagccagctatacggattcctggttctgatacgtactgatacgtactgaaatgctgccgcatagagcccgctttgtgcggtatgctttctataaaatgacgagttttgaaaggagtttcgcatgaaataccgttttcaagataacaccctgccgtttgaagagcgcgcaaaagacctgctctcccgcttaacgcgcgaagaaaaggtcggcatgattacgtcgcagctcgatgatattccgcgcctcggcattaaaaagacgcacatcggcaccgagatcgcgcgcggcgtcgtaaaccgcgaccagaagcgcgagaccaccattctgccgcagccgtggggcatggcggccatgttcgacgatgccctcatggagcagcttggagacatggcaggcgatgaaacgcgcattacgcacgatatggaagaaagaccgtcctctctggagcttttcggacccaccatcgatatggagcgcgacccgcgctggggcagaaacgaagaagcctatggcgaagacccgtgccttacgggtaaaatgagcgccgcctactgccgcggccttacgggcaaggacgagaaatatttgaagaccgcgcctttgctcaagcatttctacgccaacaactacgaaaacgagcgccagacgacgaacgcgaacatcaccccgcgcttaaagcacgagtattacttaaaagcgtttgagcccgccgtgcgcgaaggccgcgcgccgggccttatgacggcgtacaactgcatcaacggcgtagagggcgtcaacaacccggacgtttcggaaatctgtaaaaaagagtggggcatgacgttcgctgtcagtgacggcggcgatttcggccagaacgtcgccgcgcaccgtacgtatgaaaaccacgcgcagtctatgggcgacatcctcggtgtcggcgcggatatgatgctcgacagccgctccatggttgaccctgccgtgcgcgaagcgctcgaaaaaggctacctcaccgaggaaaacctcgataaagccgtgtattccacgttattgatgcgctttaagctcggcgatttcgatgaagaccacccctatgcgcacattgaccccgcaaagctcgcaagccccgcgcacaaggcgctcgccgtaaaagcggcaaaggagtccgtcatcctgcttgaaagtcgcggcatgctgccgttaaaggatgacggcaagtgcaccgtcgcggtcgtgggcccgctcgcaaatgaaaactacacctgctggtactgcggctatgcaccgaaccaaacgccggtcgtcaagggcttcagagaaaagctcggcgaagaccgcgtactgttcgatgaaggctttgaccgcgtgcgtatccgctccgaaaaaaccggcaagtacctgcgcatcgccgaaaacggcgcggtatatgccgatgccgacgagaacaccgccgacctctttgagcgcgcggattgggacttcggcgcatggacgctgcgcagcgtgcgcaccggcaagtacctcaccgaggacaaaaatttcttcgacgagaccccgcaggacaaaaacgccgtcaccatcgaccccggcatgaactgtacggcagacgtggtattcggctggttcgtgaaagaactgctgtatgccaaggaagaagacggcgttttgtacctcgatacctggcagcaccgcgctgtggccgtaaacgacgaaaataagctccttgcaaaggtcgtctccggcgattgcccctgcaagcagtttacactggaagtcgtctcctccggcgtagagcgtgtggcagagctcgcgcaacgcgccgaccacgtcatcgtctgcgcaggtaaccagccgctcatcaacgcgcgtgaggagtatgaccgtccggatatccgcctgccgaaagcccagaccgcgctcctgaacgccgcagcagccgcaaacgagagtaccttactgtacctcgtcacgggctatccgttcgccatcaacaaggagaaggacaccgccaaagccgtgctgtgctccacgcacctcggcccgtgcctcggccatgttgctgccgcgaccgtcttcggcgaaaacaatcccgccggccgcaccccgaccacgtggtatcgttctgttcgtgatctccccgcgcttgacgattacgacatcgcgaaaaaccatgtgacgtacctctattttaggggcaagccgctctacgcgttcggctacggcctcagctatacgacttttgcatacagcaatctgaccgttaagcaggaaaacggcgaagtcatcgcgactgtaaacgtgcagaacaccggcgctcttgacggcgacgaagtggtgcagctttacatgagcctgccgggctccctgcgtgtgcgtcccatccatgcactcaaagccttcaagcgcgtgcacatcaaggcgggcgagaccgtcaccgttacgctgaatttcaagatcgacgaccttgccatttggtgcaacggcagaaagatctacacggtcgaaagcggcgtgtacaaaatggaagtcggcgcggcgagcgacgatattcgccttaccgccgacgtggagattgcaggcgaagcgttcccgggtcgaccgggcttcttcaagcaggaagccatcgatgccgatgattacagcggcgtcacgttcctcacggataagcgcgacggcgaaacgtatgtggaagcgaaggatttccgcagcttcctcgtgtataagaacatggatctcaccggctgcaatgcgttcgagtgcgccatgagcgcgccctccggcgacgtggagatcctccttgcggataacaagaccggaaaagttctcggcaaagcgggcggcacaggtaccggaagcctcacaaagttcacatcgtttacgtgcgatgtcaccgccgaagccggcctcaccgagctgcgcattgtcttcacgaaacagacgtccttaaaatggttccgcttttacacggtgtgagttttgaaccgatttaaattcaaaagttgaatactcgaaaagggatagcgctgtgctgtccctttttgcatgtgtgtctttctaacggtcgctttgcttgccgtttgggagacccggttttttcagttgcatttgaaaccatacgaaaaaggtatactatgcccgaaaagcatgtggttcaatccattataggtatttgacattttaccccatcacgggtatactaaacttcaagtaaagtacagggcgtatatttatattgaaattcgttttcagaaagagggaagaacaaaagctatgttcagcggacgtttatgggagctttttatagactcctttccgaaaattctcatccccggcctgacggtcaccattccgctcactgtcatttcgttcacctttgcactcattatcgcggtcattatggcgctggtgcagttcgcaaatgtgaaggtcttaaagcagatcgcgcgtttttacatttggatcttccgcggtacgccgctgctcgtgcagctgttcgttgtgttcttcggcctttcccgcgtcggcattttgcttgatccgtttccggcggcagttatcgtgttttccctgaatgagggcgcgtattgtgccgagaccatccgcgctgcgcttgaatccgtgccgaagggtcagcttgaagccggtcagtgcgtggggcttacctatctccagaccattttccgcattgtgctgccgcaggccatgcgcacggcgttcccgccgctttccaactcgctcatctccatggtcaaggacacctcccttgcggcgaacatcaccgtaacggaaatgttcatggtcacacagcgtatcgtggcgcgcacgtatgagccgctacttttataccttgaggtcggccttatatacctcattttctctacggtgctcacttgggtgcagcgctttggcgaaaagaagctcgcgtcttacggacacaaggagggctgagttatgctgcaaattctggacattaaaaaatccttcggcgatctgcatgtgctgcgcggcgtcgatctcgacgtggagcagggcgatgtggttgccatcatcggcccgtccggctccggtaaaacaaccctcctgcgctgcataaacttcctcgaaaaagccgacagcggcacgctgatcttcgacaacgaaaaattcgaattcgataagatcaccaaaaaagagattgcgcgcctgcgccgcaaaacggcgttcgtgttccaaaactacaatctgtttttaaataaaacagcgctgcagaacgtcacagagggtctcatcgtcgcccgcaaaatgcacaaggcggaagccattgagatcggcaaaaaagcgctcgacaaggtcggtctttccgaccgttacgattattacccctcgcagctttccggcggccagcagcagcgcgttgccattgcccgcgccattgcgacaaacccggagattatcttcttcgatgagccgacgagtgcgcttgacccggagctcaccggcgaagtgctttccgtcatgcgcgacctcgcaaatgagggcatgacgatgctcgtcgtcacacatgaaatgggctttgcccgcacggtctcaaacaaggtcatcttcatggaagacggcgttatcgtcgagcaaggctcctcgaaagaatttttcgagaacccgaaggaggaacgcacaaaagcgttcctgcgcaccattcagggagacatggattgatttttgtcagtccgttatccatatttatcctacttaagcaaaggagtaagagaacatgaaaagaacactttctttacttatggctgtgctgatgctcacggcagtcgtgcttacgggttgctcctcgggcggcacaacgtccggtgcggcaagcagcagcgatgcttcctctgcatcgagcgaagcagaaagcgagtcttccgcagcggaagaaaacgacctgctcgcgcagatcaaggaaaagggcaccatcacggtcgcgatggaaggcacttgggcgccgtggacataccacgatgccgatgataaccttgtcggctatgacgtagaagttgcgcagaacatcgcaaaaaagctcggcgtagaggtcaactttgtcgagggcgagtgggacggcctgcttgccggtcttgatgacggccgttatgacatcatggtcaacggcgtaggcgtcaccgaagagcgcgcggaaaagtacaacttctctaccccgtatgcatataaccgcaccgctgttatcgtgcgcggcgattacgatgagatcaactccatggaagatctcgagggcaaaacgaccgccaataccatttccagcacctacgcaacgcaggcagaagcccacggcgcaacggtcacgggcgtggacgacctcaaccagaccatcgagctcctgctctccggccgtatcgatgcgaccctgaacgcagaagtcgtattcgcagactacgtaaaggagcacccggaagcgaacatcaagattgctacgttctccgatgaagtcgaaaaggtcgccattccgatccgtaagggcgacgacaccgcaacgctgctcgcagccgtcaacgacgcgctgaaggaaatgagtgaggacggcacccttaccgctctctccgaaaaatacttcggcaccgacatctccaaagagtaatttaaagtaaattcagcaaaacaaagctcctatccgtgtttcactgcgggcaggggctttttgcatatagaaaccgtcccgcttctgtaataacccacaaaagtgtatattttcgttgtaatcccccgtgatatggtataaatgaagcaagccgcggcgtaaaagagggggcgagcataaaacacacagcggaatccgaaagtcccgcttttaaagcgtcacatggtaagcggcttcctgttcacgattgctgcggtcaacttcgtttatgtaatcaacaatgtccatgaaaaccgcctgtccatgttcaaaaacgaacaaatttcgattacaaatccgacatttttcaataatcggtagaatatccccgaaacgcttgacttttcgtcctaaattgcttatgctatatcctgttgctgtacgcccatttgtgcagcacggtcagtcgtgacatcctgaccttaaacaaaactagcgcggccggggcggctcccggaccgcggaaaggaatgctgaaatgaataagaaaacctcaaaagtccgctttctggcgctcagcgccgtgattgcggcgctgtatgctgtcctcacttacgccgctgccgccatgaatctggcgtttggcgcggtgcagttccgcttttcggaagccttaacggtgctcccggcctttacgccggccgccatccccgggcttgccgtcggctgcctcatctcgaaccttgcaagtccgctcggcgtcgtagactgggtgttcggcacgcttgcaacgctgcttgcgggcattttttcttaccttgtacgcaacattcgctggaaggagatcccggttttggcgccgctgccgccggtcattttcaacgccctcattgttggctttgaagtggcttgccttgcggataacggcacgtttgctttcggcaatctctcccttgcaggcttcatcgcgggtgccgtttcggtcggcatcggcgagctcatcgtctgctatgtgctcggcgtgccgctgatgatggcgctgcgccgcacgaagatcagcgaactcatgttggcataaatctgttccgggcgcgcccggagaaagtcggtcggagtttatgaaaacgagcagattacaaaaaatagtaaagcgtacgtcacccacgcgcatgttcgtcgtcagctttgtgatacttatttttatcggcaccgtgttgctcacgctgccaatctcggcgaaaagcgggcggttcacaaaccctgtggacgcgcttttcacggcgacctccgccacgtgtgtcacgggcctttccgtgtatgacacgtttatacactggtcgtatttcgggcagggcgttctgcttgtgctcattcagtgcggcggcctcggccttgccgcgtttgcaacgggtctcacgctgctcgtccgccgccgcatcggcattcgccaccttgtactcgcccgcgaaagcgccggcggcagcaatttggatgtcatctcgctgctgcgcatcgtggttgcgtttacgtttgcggtggaatctctcggcgcgcttctgctcatggctcgcttcgtgccgctctatggcgggctcggcgcatgggcctcggtgttcgtctccgtctcggcgttctgcaacgccggcttcgatattttaagcttcatccccggcaattcaagtttatcggcctttaacggcgacccgctcgtcacactgacgattgcaatgcttatcatcatcggctccacgggctttgtggtgtttcaggatatttaccgcaagaaaatctcgacgcgcctgcaccggcagcacgtggaaaagctgagctttcacgcgcaggtctgcctgcgtgcatctttgacgcttctggttttcggtacggtgatgctgtttatccttgagtacaacaatacataccgtgatttaaacttctttgaaaagctgaacgcggcgttttttcagtcggtcaacacgcgcacggcgggctttgcttccgtcagcattaagcaggaaacggatggtgcaaagctcctcacgtcgttcttgatgttcatcggcggctgcccgggctccacggcgggcggcattaaggtgacgacgcttgtggtgctgtttgcggcggtgaaatccactctttgcggcgaagacaccactacgttcctacgccaccgttttgaccccggtatggtgtacaagtcccttacggtcgtggcgttcgcccttgtggtctccgttttgaacgtgagtctcattttagcgctgcaccacggtgtttccatattggatgcgataatcgaagctgtttccgcctttgcgacggtcggcctcagcgcaagcctgaccccgacgctgcatccgcttgcaaagcttgccctgacgctgacgatgttcatcggccgcgtaggccctgtctcattcggcgtggcgattttaatgcgcaaaaagaaaagcggttccgttctgccggagggcagaatgctgatcgggtgattttggatcctctgtgcgttttgcacaggggatctttgctttcatcgcgcacattttaagcccgtttccttgcgaaacagggggaaagtatggtatactattttgtacgtattttgcgtgctgttcaggcttcctaaatgcgtttcaatgcggcaatttacgattttgatatgggagtgatttcaatttgtctcagaagacggaacagaaaggccagagctttttaaagggtaccgcaattttgacggcagcgacgtttatcgtcaaattcatcaatatatttttctccattccacttgcgaatttcctcgatgatgagggcatggggcatttcaacacggcgtatgacatttttgtgtttttcagtgttttggcatcttccggcacaccggtcgccatttcgcgccttgtcagcgtggcgtatgcacagaaccgcaagcgcgaagcggataaaattttccgtgtggcattcacactgttctccggcatcggtcttgtcggttgcatcgtcatggcggtgttttcccgtcagttcgcgatgctcatgaaccaaaatgaccgctccatgtacgccattgcagccttggcaccgatgtgctttttcatgtccgtttcgtcgtgtttgcgcggctatttccaagggcgttccaacatgacgccgacggcggtctcgcaggttttggagtcgctcattaaactgttcgtcggtattgcgctggcactgtatttcctgaagaccaccggcttgccggagcttggcgcggcaggcgcgatcctcggtgtttccatcggctcgttcttcgcggttttgtacattcttctgtactacttccgcaaatcgcgcgatacgcgctattcaccttttgagccgaaggtttcgagtgttggtgaaattttgaaatctatcctgacctttgcggtgccggtcatcatcggctctgcgtttttgagtgcgctcgacattgtggattcctccgtgatgatgtatcgtttgcagggcgctgccggtgtggacgcgaactccgccatcgccatgaagggctggctcggcacggcgcgcaagtatttcgacctgccgaacgccgtcatcgtgcccatctctaccatcgtgctgccgatgctttccggtgcgatcgcaaaaaaagaaaagcgcgaaatcaaccgtatttccatgctctccctgcgcatgacgctcatggtagccatcccgtctgccgcgggtttgtgcatttttgcaaaacccatttgcttcctgttgctttacagccgcccggagtttgcggcaaataccgcgccgctgctcgccgttatggcaccggcggtcatcacggcgagcttactttacactacgaatgcgatgattcaggcggtcggcaaggtatacgtgccggtcatcaacatgattgtcggtacggtggtacgcatcggcgttgtgtatgtgctgtgcggtatcccggagatcaacgccatgggctctgctgtcggtacgttcgtttcgtatcttgttatgattattctgaaccttatcgcgctgcaccgtatgctgccggaaattccgagcgtggtgcgcatgggcattcgtccgctccttgcttctgtcattatgggcgcggtctcgtaccccgtatatctgctgctcacgcgctttatgagtgagaagttcgcggtcattccggttattctgcttgcaatcctcgtttaccttgtggcggcagtgtttaccaaagccatcacgcgcgaggagatcgtgcagctgccgaagggtgaaaaactggcggataaactgcatttgaagtaacttcctgtcttgtaaaggccatgtgcctgtgataaaataaaattataagtttttggggaatttcgcggtgcggaaaacgattttgcgccgacgaaagaaaggatgggtattgtggaagcaactgtgacaaataagggcaaaaagggccttatacgccgttttgcgccgtactttaaaaagtatctgtggatcctcattttcgacctgttctgcgcggcgctgacgaccgtatgcgagctggcgttgccaatcatcgtgcagcagatcacggaccgcggcatcaatgacctggcgtctttgacgctcagttatattctgcgcatcggagggctgtacattttcttaaagctcgtcgacgtgggcgcgacgttcttcatggcgtctatcggccacatcatgggcacaaagatcgagaccgacatgcgccgcgacatgttcgcacacctgcagaagctttcgttctcgtattttgacaacacgaagatcggtcagctcatgtcccgcatcacgactgacctgtttgacatcacggagtttgcgcatcactgtccggaggaatttttcattgcgggcattaagatcatcggcgcatttgtgattttgtgcacgatgagtgtgccgctgacgctgattatctttgcggtgctgccgtttatgctggcggccgccatgttcttcaataagagaatgcaggcgcagttccgcagccagcgccaacagctcggcgagatcaacgcgcaggtggaagacagcctgcttggcgtgcgcgtggtgaaatccttcgcgaacgagccgcttgaagaaaagaagtttgaagagggcaaccagcgcttttacaacatcaagcgtctgcgctacatgtatatgggcggctttgaagcctccaataaattctttgacggtctcatgtatatcgtggtcgtcattgcgggcgccatcttcatgatgaacggagccatcgacccctcgcagcttgtggcgtaccttttgtatatcacaacgctcatcaattccattcaccgcatcgtgcagtttacggagcagttccaaagcggcatgagcggcgtggagcgcttctttcaggttatggacgcgcccatcgagatcagcgacgcgccggacgccaaagatatcggcattgtcaagggcgacgtgacgttcgaccacgtaagcttcaagtataacgacgacggcaccgaggtgctttctgacattgacctcgacgtaaaggcgggcgagaacatcgcgcttgtcggcccttcgggcggcggtaaaacgacgctgtgcaacctcattccgcgtttttacgatacgactgccggcaccatccgcatcgacggcaaggatatccgtgcggtgacgctgaaatccctgcgcgaccgcatcggctttgtgcagcaggacgtgtacctgttctccggctcggtgtttgagaacattcagtacggcaagccgggcgcgtcgaaagaagaagtcattgcggcctccaaaatggcgggcgcgcatgaatttatcgaggggctttcaaacggctacgatacatacgtcggcgagcgcggcgtgaagctttccggcggccagaagcaacgcatttccattgcgcgtgcgtttttaaagaacccgccaattttgattttagacgaagcgacgagtgcgctcgataacgaaagcgagcgtatcgtgcaggcgtcgctcgaaaagctcgcgaagggcagaacgacgttcacgattgcgcaccgtttgacgaccatcaagaacgcgacgaaaattctggtgctgacggataagggcattgaagaagccggtacgcatcaggagcttatgaagaaaaagggcatttactttgacttatataaaagctatcaggaaatgacggcggacacggaataaagcccaaaggaaattttcgggtatgtatattttgaaaggacgggaaaactatgaaaacagtgacactcggcaataccggcatcacggtcaatcgcaacggcttcggtgcgctgcccattcagcgcatttccgttgaagaagcgggcaagctgctgcgcaaagcatacgataacggcatccgctttttcgacaccgcacgcgcgtattcggatagcgaatataagatcggtcaggcacttgccgatgtgcgcgacgacatcatcatcgcgacgaaaacggcctcgacaaccgttgaaggcttttggaaagacctcgagacgagcctttctatgctgaagaccgaccacgtggatatttaccagttccacacgccgtccttctgcccgaagcccggcgacggtacaggtctttatgaggcgatgctggaagcgaaagcgcagggcaagatccgtcacatcggcatcacgaatcatcgcctgcatgtggcgcgcgaagccgtggaatccggcttgtatgaaacgctgcagttcccgttttgctaccttgcgagcgaaaaggacattgagctcgtgaacctatgtaaggagaagaacgtcggcttcatctgcatgaaggcgctttccggcggtctcatcacgcgcagcgatgcagcgtatgcgtaccttgcgcagtatgagaacacgttgcccatttggggtgtacagcgcgagaaagagcttgacgagtttctttcctacaatgataacccgccggtgatgacggacgagcttgcggcgttcatcgaaaaagagcacgagtccctcgcgggcgatttctgccgcggctgcggctactgcatgccatgtcccgctggtattgagatcaatcagtgcgcgcgcatgtcgcttatgctgcgccgcgctccgtccgccgcatggctgacgcccgagtggcaggcgaaaatggagctgattgaaaactgcaagcactgcggccagtgcatgaagaaatgtccgtataccttaaacacccccgaattgctccgcaagaatctggaggattaccgcacctttttaaaataaaggagaaagttccgaattatgacagcaaacgaattttacgcgtctctttccggcaagcgcatcacgtttgtcggcgttggacgctccaacctgccgctcattgagcagtttaaagcccacggtgcagccgtttcggtgcgcgataagcgcagcgaagcggcgctgggcgaagacggcgaagcgctgaaaaagctcggcgcaaagctcatctgcggcgaagactaccttgaaagtatcgacgaagacatgctgttccgcgcgcccggcgtgccgtatctgctgcccgagctgcaaaaggcccgtgcaaacggtgttgccgtgacgagcgaaatggaagtctttttcgacctgtgtccgtgcaaaatttacgccgtgacgggcagcgacggcaagacgaccacaacgtccgtcattgccgaaatgctgaaagcggcgggcaagaccgtgcacctcggcggcaacatcggccgcccgcttctgccggagatccgtgatgtaaagcctgaggatgtggcggtggtggagctttcgagcttccagcttatctccatgcgccgcagcccgaatgtcgcggtcattacgaatctgtcgccgaaccacctcgacgtgcacaaggatatggacgagtacgtgaacgcgaagaagaacgtacttttgcaccagaatgcgttcggccgcacggttttgaacgcggataacgccctgacggcggcctgtgccgctgacacgcgcggcatgacgtacatgttctcccgcagagagaagacgaacggcgcgtggtgcagcgcggacggcaaaatctacttcggcgacgaatatattatggaggaaagcgacattcgcattcccggcaagcacaacgtcgaaaactaccttgcggcgatttctgccgtgtggggcgatgtctcgaaagaggttatcaggactgtcgcgaaagaattcaacggcgttgagcaccgcatggagttcgtgcgcgagctggacggcgtgagatggtataacgactccatcgcaacgagtccgtcccgcgcaatgatcggcacgctttcgctgtatgatttcaagatcgttatgattgcgggcggtgcggataaaaaggtgccgtttgacgagctgggtaaggtcatttgtgacaaggtgaagacactcgtgctgctcgcgcccgaaaaaccgcttgagggctttaaaacgccggctgcggggaagatcgaagctgcggtgcgcggtgccgaaaactacaaggacggcgcgccggtgattctgcacgcaaacaacatgaaggatgccgtgcgccttgcaagagaaagcgcagagccgggcgacgtggtgtctctgtgccccgccgcaacgggctttgatatgtacaagagctttgccgtgcgcggtgatatttacagagaagaagtgaaagcactgaagtaagcacaagctgacgtgaaagcggacgcaaaagtctttgattaaactttcttcagaaagtttaatcagattccaaaggtgaaacctttggtcgagctccgaggaaatcgacttagggcgctgacctaataaacccaaccgaacgcaagcgttcgctttcaagttttctcgaagaaaacttgactaaagactttattcgttttaagacgaaagaacagggaaacaacaaaacaagaaatttgcgcactcggcgccgcttcgccgtagaccgggcggggcgtgattgtggaagattggataggtataatgaaacagtataacaagggaaatgacagaaacaagggctttcagggcagaaacggtcgttccgaccgccgccgtgacattcgcgacacgcccctgaaccgcatggaagagacgattttggcgaccatgcgcagcgaggaaattcacgactggagcgcacgccagcttttgaaaaaggcaggtgtgctcgacaagcttgctttttacgatgcactgcgttctttaaaagaccgccgcatgattttacttgaccgcgagcacaatgcgaagcttattccggtcggcgaagacgtggaagcgacgctcgtttcgctctcgaagaacttcggctttgcgcgccccgatggcggcggcgacgacatttttattcacggcagcgctttgcagggtgcgctcgtcggcgacaagatcatcgtcggcgacattcgcaaggacgaccgcggcccctccggccgtgtgcgccgcatcgtagagcacaagcctgcgcagacgaccggcacggtgagtatcaccgatgagggcattgagctcatcccggacaatgccattcgctataatttacgtatgcgcgagcgcgatttaaacggcgcgaaaaacggcgacaaggtcatggcatctttggagcaggattaccgcggtgactgggcatatgccagcgtgaagaaggtcttcggcagtggccgcacggcgcgtgtctgcgccgatgccattgtagagcagtacggcattccgcatgttttcccgcaggaagtgctcgacgaagccgagcgcgtcggcaacgagcccatcagcgacgaagaatacgcaaagcgccttgacctgcgcggcgagccgatcttcaccatcgacagtaaggacgcaaaggacctcgacgacgccatctccgtgaagcgcacggacttcggttacacgctgggcgtgcatattgcggacgtttcccactatgtgaaagagggctctgccatcgatgaagaggctatcaaccgcggcacgtctgtgtattttgccgaccgcgtgattccgatgctgccggaggtgctttcaaacggcgcgtgctccctgaacgcgggcacggacaagctggccttctccgcgcttatcgagctcgacaaagagggccacatcacaaagtacgattttaaaaagtcgatcatcaattccaaggtgcgcggtgtgtacagcgaggtcaacgaaattctggacggcacggcatcggaggagattttgaacaaatacgcgcccgtcatggagtccttgatgtcggcgaaggagcttgccgatattttgaaggcgaactccgcagcccgcggcaccatggagctggacagcggcgaatcgaaattcattcttgatgaaaacggcatttgtatcgacatcatgccgcgcgtttccggcgaagcggagcagctcatcgagcagatgatggtgacggcgaacattgcggcggcgaaattctcgctcgaccataaattgccgttcctctaccgtgtgcacggcaccccggacccgaagcgcgtagaggagcttgtgacgctgttgcagctcgtgggcgttccgtgcaaggagatcgtaaagccgaaccccgaaacgcaggatttcgccgcgatcctcgaccgcgtgcgcggcctgccgtgcgagacgcttgtttctcagcgtttgctacgcacgatggaaaaagcgagatattcgacggaggagaccggccacttcggcctggcgctttccgattacagccactacacttcgccgatccgccgttacccggatacgtccattcaccgcgtgctttccgcgtttgtggaaggcatgccggcagaagaggtgcgccgccgctacgcgcagttctgcgagacctctgcgacggaatcctcccgcaatgaaattcgcgcgctcatcgccgagcgtgacgccgaggactgctacatggcagagtacatgagtcagcacatcggcgagcactttgaaggcaccgtgagcggtgtgacgatgcgcggcgtgtttgtgcgcctcgaaaacagcgtagagggatttgtttcgctcgatgcgttcgagggcgaagattttgtgtacgacggccttatcacacagcgcagtccgaagcgcgaattgaccatcggcacgccgctgccgattatcgtggcttccgcctacgttgcgaccggcaaggtagacttcgtgccggataaagagaagctcgacatttaaggtatgaaaaattcccctgcatcataagcttttccgacaggataaaaatgggggagagcgtatgcggggaatcaaaaggctcatcggctcggcaatgctgggcgttctggcactggcggttttgtattttacggcgccgtacaccggcgtgtatattcccgtcagccggctcagcgtggcggtatccgctgtgcttggcgtgccgggcgtgacgctgctcgttttgctgagcttgctgtaaacgtatagatgtattgaaaagaaaactgcggttttgccgcagcggagaggagtttttaatatgtttctgatcaacgcaaatgtactggacgacaaattctgcctgcgcaaggcggatatcgagatcgaagacggcaagatcgtgcgccttgaggattctttgccgtacaaagaggaagacctcgttgtggactgcgcgggctacaccattgtgccgggctttgtggacgttcacgtgcacggcggcgcgggtgcagattccagcgacggcgacgcagagggtctgcgcaatatggcgaagtttctgctgacgaagggtgtcacgtccttctgcccgaccacgatgaccgtttccgatgcggagatcttgaaagcgctcgagacgattcgctcctgcatggacgacaaggaaggcgcgaagattgtcggcgtgaaccttgagggaccgttcatctcgccgaagaaaaagggcgcgcaaggcgacgagttcattcaggcgccggattacgacgtgtttaagaagtattacgattcctgcggcggcatcatcaagcttgtggacattgcgcccgagtgcgacgtgcgcggcgattttgtagagaaagcctcgaagctctgcaccgtttccattgcgcacaccgcaacggattacgacggcgcggtggacgcgttcaaaaagggcgtaacccatgcgacgcacctgtataacgcgatgtccggccttgcacaccgtgcaccgggtgtcgtgggcgcggtgttcgacaacgaaaacgtctgcggtgagctcatctgtgacggcatccacattcacccggctgtggtgcgcacgacgtttaagctcatgccggagcgcgtgtgcgtcatcagcgacgcgatgcgtttgagcggcgtggaagacggcggccaaggcatgctgggtgtgaatatggtcaccgtaaaggacggcaaggcgacattgccggacggcaccattgcaggctctgttacaaacctgcacgcggaactcaagaaccttgtttcctggggcattccgctggagaccgccgtgcgcgccatgacgctgaccccggcgaaggagatcggcatggaaaacgagatcggcagccttgcacccggcaagcgcgcagaccttgttgtgctcgatgagaacctcgagattgtcgcggtctaccactgatgcttttgcctttgccgtgcggccttgacggcggggcatgaggatagaattagggaagaacagaaaggaaagaaaatatgtattgcacaaattgcggaagaaagctccccgaagacggctcgccgtgcgtttgccggcagcagcctgcacagcccgagcagcagacgtacacacagccggtgcagccgcagcaaaactacggcgcacccacgcagaattttcagatgccgccgcagtattacgcgcagccgccggtgcaatacccggtgcagcgaccgattacacccgtgcacggtgtgctgaaaagctttttcgcgtctccgctgttccttattacggcgatcctcttttcggtgaatttgctgtttcagatcatcgcaagcctgttcccgcaggatccggcgtatatcgtaaatcagatttacagcaacctgccgtatgaaatgcagtttatcgtttcgccgggcgacctgtacagtgcgctttcggatgcgcagagcggcaccacggtcggtacggtcatcggtatgcttattacaggcggcttaatggctgccgcgtactggatcacgtacatatctgcgaaaaacccgagtattccggcggcaaaaacggccggcctcaccatcatgaaggtgttcagcatcatcagtcttgttgtgatgagccttgcggaggtgctgtgcgttgttcttgccgtaatcttcggtgttgcccttgccggcaatgactacggctacatggatgagatgatgagcgttatctttgtctttctcattgcggcctgcatcttcggctttgttgtactcatttttgagatcatttacgaagcaaaggtcataaagatgctgaacagcgcgaagaacgcgatgctgacgggcatggttccgaataaggcttccgtgtttgtggcggtcatctgcttcatttcggcggcggtgtcgttcttctccgttttcggcgatgcggtgctgtacggatggatccgtgttccgctcggcctgacgagcgttgcgctcaacgtgctttatggtctgcttgttctgcagtttaataagatgctgaaaaacgcaggcatggctcgataaaacaaaataagtgaacgcgacctgctcccggccgcggcaggacggtgtagttccgctgcgcgggggtgggttctttctaaaaggcttcgattttcgggcgtttttgtgctaccgtttagcttttatgaacttgcgctgcaagttcattgggagaccccctaattgggtctcccacactttaacagtccaccggactgttaaagttcccgtcctgattttttgaatgcaaaaagatttcgccatttgcgaatggcgacttaggacgcagccctaagaacccgccgcctttgaaaaggcgggcgaaacttttaaccatggttaccgcaggctgcgaaaaatctttacaaatctttttccgtgcgctacaataggggaaagattgttttgaaatggggttttatagatggtgaagattcccgaaaattacacgccgagccttggtctttacgagacgcagaaggcaatcggtctgataaagaacgtatttctcgtcaaaatttgtgcggcgctgcatctaaagcgcgtcaccgcgccgctgttcgtcgacccttccacgggtctgaatgacgacttaaacggtgtggagcgcccggtcgagtttgacattccggcagtcggcggcaacgcgcaggtggtgcattcccttgcaaagtggaagcgccttgcgttgcatgattacggcttttacgtgggcaacggccttgtggcggacatgaacgccattcgccgcgacgaggagctcgacaaccttcactccatctatgtggaccagtgggactgggagaaggtcattgaccgtgacacgcgcaacatggcgtacctggaagacacggtgcgccgcatcgtcagcgccatctgcggcacgctggacgaattaaagtggcagttctccggcctttccaccgagctttgccgcgacgtgtatttcatcacggcgcaggagcttgaggaccgctaccctgacctcaccccgaagcagcgcgagaacgtcatcgtacgcgagcaccgcacggtattcatcgagcagatcggcggcgtgctcaaaagcggcaagccgcacgacggccgcgcgccggactacgatgactggagcatgaacggcgacctgctgttctggcacgagccgcttggcatggcgctggaaatcagcagtatgggcatccgcgtggatgaaaattcgcttgcggcgcagcttaaaattgcgggctgcgaagcgcgcgcggagctgccgttccacaaaatgcttttaaacggcgagttgccgctcaccatcggcggcggtatcgggcagtcgcgcctttgtatgcttctgctcggcaaagtacatatcggcgaggtgcaagcttccctctgggacgaggagacccgccgcgtctgtgccgaaaagggcgttatcctgctgtaattgtgcttgaagttgaataaaacggaagccctctgctgcgattcttactttgcagcagagggcttttttatgccgaaaaaatttataaagacggaaagtgttttagcgttcgcggagttcagctgaattttaaccgacaaagaggtatgctcagcacttcgtccacttcatcaaaagcgattttggcaggatatgcgctaagaagcggtagaacttataaaatccgcccatggtgcaggcgcttttgccttttaatccggctttcagggcgcaggtcgccatttttgcgggcgactggtgcggcagcatgtcgagcgtgcggcttttatgcgtggggcggtcggcaacctgccagaactccgtgatcatcgggccggggcacacggcaaggacgttgatctttttaggctttaattcctcgcgcagcgcgcgggagaagctttgcacgtacgcctttgtggagcaatacactgccatgcgcggtgtgggcgcaaacgacgcgatggacgagatgttcaggataagcccgcccgttttcatatacggcaggctgtaccgcgtgacggcggtcagtgcgcggcagttcaaatcgatcatcgcggtctggctttcgacgtcgcttgtcgcaaaatcgcacagcttgccaaagcccgcattattgatgagcagtgaaatttctggcttttcgcgttcaagcaaagcgttaaattgttttaatgcggcggagtcggtgaggtcgagcgcgatggggcgcagatttttttccgggaactgcggctttaatgcttccaagcggtcttcgcggcgagcgatgagccaataggtgtcgatctccgggcaaagggtgacagcggcgcgtaaaaactcgatgccaagtcctgaggaagcgcctgtgatcacggcgattttcatagtgactgtcctttcgaaattttccgatggttgtgtctccattctacctccgcttcagctgcctgtcaaacgcctttttggacaatttgtaaattcgcgcgaaaaaatgcaaaaaacggtataaattttcgtgaaagtgtggtacaatgacaataattactgtgatgcgtacgcaccgtgtacgcagaaaggacgcatacatgacaaatcaaagaaaaagcatgcgctttataggctgtctgctggcagttttcatgctggcagttgttttttgtctgccggctttggcggacagcgcatcatcgaacacatacacgatcccggacacgaacatgaccgtcacaatccccgagggcgcgacggtgctttccatcgataccccggcgggcgatgccgcgtggagcaaggcaggcattttggacgcgagcgagaagatcaaggaaatgcagaaaaacgggaccacggcggagattattgcggcaaacggcgataccatagccgtagcggagaaatcttccgattacgcgaactccgtttttaacctcaataatctggatgaaaagggcaagaaggattttttgaaatacatggagccgtcttccatggacggcagcacgaccggtaccatcacgtggtacgaccacgcacagattccgttctttatgatcgacatctgtgcggagaatatcaaggaggagggacccgtgtacgagcgcctctatggtacgctgtacgacggcaagattgtttcgtttgacctcttcggcgatacgaaacaaatctcggaggagacggacgcattcatgcgcgccgtggtcgattccgccgttatctctgcctttgcggaagtacctacgattgaaaacggtttgagcagacagagcgctgtgacgctcggcgcagtgggtgtgctcattgtgctgctcatcgtttactttgtgacgacgcacagccgcaacaagcgtgaaaagcagcttagaaaagagacggcggaccgccttgcggaataccgccgctcgaagcaggacgacgaatccgtcggtacgggcgcgttgcgttttgtaaacgagaccgaccacgacgacgcggcaatcaagacgttcgcgaactatcaggcgtatcacttgcaaattttcatgccggtgttcaccgtgattttaagcatcatcgcgctgtatgtcgtgtggcagctcggcaatttcgacagcaactggtgggtcatgctactgcttatcggctttgcgatttacagcctttataagcttgcgacggcttccaccaacacggcaaaggtgcttatgcgctcctacggtaagctgcgcagccgccgcgccgcgtactatttctacgatggcgacttccgcatcacgggtttacaggcttctaacctgcacccgtatttccagatcagccgcatgtatgagacgaatgaatatttctatatgtatttcggcgagggcaatacgtactttatccgcaaggacggctttaagcagggagacgccgatgcgttccgcaactttatgaaggaaaagctcggcaagcgctttaagtaaaagcaacaaataaacaacaaaataataggaacgcgcaacaaatgaaaatcgaccgcgcgggctttatgcggtataatgggggcgctttgaaagcagccccgaaagagaggatttcttacatgatcggtattatcggagcgatggagattgaggtcgcgggcatcaccgcggcgctgacagaccataaaacggaaacgctgtgcggcgttacgttccacacgggcaagctgaacggcacggacgttgtcgccgcaaaatgtggcgtgggcaaagtgaacgcggccatgtgcacggcggcgatgatcctcaactacgcaccgtccgtcgtcatcaacacgggcgttgcgggcggcatcggcgagggcgtgaagattggtaatatggtcgttgcgtcccacaccgtgcagtacgattacgacaccaccgccatcggcgagccgaaaggcttcgtaatgatcggcagtgagggcgttgtgcagctgccgacgagcgcgaagcacaatgcggtgctcgaaaagtacgccgagaagatctacaacggcgtgcatacgggcgtcattgcgaccggcgaccgttttgtggcggatcccgccttctgtttgcagctgaaagccgagttcggcgcaatctcctgcgagatggagaccggcgctgtggcacaggtgtgcgcggtgaataaaacgccgttctgcggtctgcgtgccatctccgataacgcgaacgacgagggcagcgtcgattttgagacgtttgcaaaatcctctgcggaaaagtgcatcgagcttttgaaagatgctgtgggtgagctgaacgaagtgcagtaagacagtttggtttagagcgaaaggaaagaatgtatgcagaacaaatatcttgccatgaccccgccaatgggttggaattcatggaacacctttacatggaacatcaacgaagacctcgtgtgcggcgcagcagacgctctgtgcgcaagcggccttaaagataaaggctatgagtacgtcgtcatcgacgattgctggagtctcaaacagcgcgacgaaaacggccgccttgtgccggatccggagaagttcccgcacggcatgaaggctgtggcggactatgtgcactcgaagggcctcaagttcggcatgtactcctgctgcggcacgcacacctgcgcgggctacccgggcagctttgagcatgagttcgtagatgccgagacgtttgcttcctggggcgtcgattaccttaagtacgacaactgctataaaccgaagcacatggacggcgaagtgctctataagcgtatgtctcttgcgctgcgcaactgcggcagagacattgtgctttccgcctgcaactggggcaacgaagacgtgcacagctggatcagaagctccggcgcacagctgttccgctccacgggcgatattcaggataactgggaatccgtaaagaacctgttcctctctcagctcgataagacggcgttcagcggcccgtactgccacaacgacattgacatgctcatcgtcggtatgcacggctccagcaacaacgagttcatcggcaacatcggctcctgctccgacctcgaataccgctcgcacttcgcactgtgggccgtcatgggctccccgctgatgattggctgcgacgtgcgcaatatgaccgatgtgacgcttgaaacgctcggcaacgaagacctcatccgcatcaaccaggatatcgagtgccgcgcgccgtactgcatccgccagtggaacaacccggagaacgtcatggcgctcgtaaagcccctttccgacggttctcttgccatctgcttcgtaaacttcggcgataaaaagagcgaaatgtccctgcagttctgggatatgggcatctcttatgcggagaacatcggcctctccttctacaactgctatacaaagcaggatgagggcaagttcgccgagcgctacgtggcgcaggtggagccgcatgacaccatggtgttcattgcaaagcccgtgaagctgaaataatggcaaactataaaacctgccgcacctgcggcgcaccgctccacgatgacgacatcgccatttaccgcaagctcgtctaccgcggcgcggaggactttttgtgcatacagtgccttgcggattatttcaagtgcccgaaagaggaaatcgaaaagcgcatccgctattaccgcgaaagcggcgtgtgcacgctgttccgctgattctatcccgtaaattaacaccgccggaggatttttttgccttccggcggttcggcgttttcatttataagaaatccatttcgcaaaaaggagataccactatggccgataccatatctgtcagtatcattatcacgtttgcagcagagctgctgttttcgcttgcgctgcccatccttgcccttgtcatctggaaaaagaaggagggcacagagcttcgcccggcgtggatcggcgcggcggcctactttgtgttcggtatggtgctggagcagctcatcaatgccgctgtgctcggcacgggcagctccgccgtttccgcgttcctgctcggccacccgtggctttacgccgtgtatggcggtctttcggctggcattctggaggagaccgcacgctttctcgtatatagaacgatgctgaaggacagcgtgggccgcgaaaacgctgttacgttcggcgtcggcttcggcgggctcgagtgcatcatggtgctgggtcttacggtgctctctacgctcatgatgtccatctcgttcaataacatgggagcagaggcgtttgccgcgcagtatgcgaactcggagtaccagatcgtccttgagaccatcgcggagatcaatgccatcagccctcttgccggcgtgatgaactgcgtggagcgcactgcggtgttcgcactgcaaattgagctttccgttttgatgttcggcgtggtgcgttcgcagaaattctggctgtaccccgtcagcatcctgctgcacgcggttgttggcttcctcgcagcgctgtatcagacgaacgtgcttacctccgtctatcttttggaggtgctgctcgttgtgtacgccgtggcggtcttcttcctcgcacgcaaggtctacggtgagctgcccatggaaaaatcgcgcgagcttgaccatttcggcagagtgattaagcgcaaatgagtttagaggttaaagcctgtgccgcacttacagagccggagcgtgcagaaattctcgcgctgcaaaatgaagtatacagcggcgaaaatctaaagaatacggtctggctgcaaacggaaagccactttgaccgcaccgtaccgtgcttttatctcggtcgtgaaaacgatgcgctcactgcatttttgtcgctgtttctgccgacgcaggaggaggccgaggtaacggcgttcacgaagcaatccgcgcgaaattgcgggcaattcacggcacttttgcacgccgccgcaaaggaaatgcaggtgcacggcgtgcctgattttttgtttgacctcgagccgcaaagcgaaacgggaaaggcgtaccttaaaaagcactttccgaacgccgtccacagccacacggaatatcgcatgacgtgcgagccggcggttttcccactgccggaaaacataaccgtaaagtgtgtgacgggggagacgctcgcggactatctgtccgtttccctgcgcaaatataaaaattttgaagccgcaaaagagatgctcctcgccgaaaatcgcacggcgtatgtgctgtatgtaaacggtgagcccatcggcgtgtttgacctcgcgggggaaaaaacggacgaaacgttgtccctctgcggcgtggcggtaaaagccggtgagcgcggcaggggctacggcaaactccttatgcgcgcggcgctgaccgaagccaaaaacgcgggcaaaggcatcgagctcgacgtcgattccgaaaacccgaccgccttaaatttataccgctctttcggctttgcgccgacctttgaagtggaatactggcgtgtgcccgtgcacgactgcctgtaaaaaatgacccccgcactctcgtgtgttaacgagaatgcgggggcgtttaaatttaacttattgcacaaaaagccgcacttttcccgtgatgccgctcgcgggcagtgtcatatacgtcgaaaagaaatcctgcatacgctgtgcaagcgtgttgcagacgaacacttctacgtcgttttcgcccgcttttacggcttccgtaatatcccagcggtacgggcggcagatgcgctgccccatgtccttgccgtttacgaacagccgtgccgttacgccgacattttcaaattcaagctctacgtgtgccgtatcgtttatgttgagttttgtcttataccgcatttcgccggaaaactccgtttcaccgtttttgcccgtgatgttaaaaagcttcgagtttttacggaacggcttgaattccgtctccttgcccgtctcacgcaggtcaatgtcccacagcgtctcaatctccgccatatgcagaccctcggatttctccggaaagcctgcccattcatcttccgtagcgctgccgaaaatgaggatcaccgattgccccgcttcaagtgcgagctcgactgtgccgtctgccgtctcgccacgcgcatagacaccgtttaacagatccgccgcgatgtatttgccgctgacgggcagcgaaagcgtctcctgtaccgcgttcggcgcttcgttgaagacaaagaagcttgtcgcttcgccgcgcgtgaactttgcaatgcgcagcaggtgctcctttgcgttatattcgtgcgcgaggccgctttctttgatgtgcgctgcaagcttttgaagcggcacgatctcgttttcactgatattcacgcagtccggtgcgtaatcgacaaagaataccggcacgcctgcgtttttgagcgcttcgcagatttttgcaaagcgctccggcagctttctgcacgccggcacgacgaggtatttgtacccgcgcccaaagcgtccgttgttcttttccgccgtctccagataatcgagcggcacgatgtcgtagaaaatttgcgcgtcatagcacgcttttgcaggcttttgcgtcaacatggcgcttgatttgtccatccactcggcttccgcgtggtataaaattgcgccggaggcttccatttccgcgccgtacagatagtgcgccgcacggttcacgtagtgcatcagctgcgtgaagcccgcaaactgcgggtcgttgccgtctgcgccaaagtgcggcggacagtcgcggtcggggaagaaatcgtcaaatgcgtgcggcacaaagtggtttactccgcgcacaagcaggaagtccatcaaccatttcatgacgttcgcgccttctgcccaaccgtatgcgccgaacacctcgcacatggcgcgaccattcatgttcggattttgccgcgcgtgcgaagccgcaagctgccccaaaacgtagtggaagaattcgccgtccaccatgccgcccgagacgagcgccgccgttttgtagtcggccatgccgggcattacctggtgcagcacaatgtctatgccactcatgtcctgcccgtcgagcccgcggaagtaatgtcccgcactgcacccaagacgcgcgtgcgcgttcatgtcttcaatcaaatgcccaatgtattgcacaccgtgcgcacggcaccaatcgccgagcggataggagaaattctttttccaaagcaacgtcacggcgtccatgtacgcaaggcgaatttccgcggtcagctcgtcatgtgcataccacaaaatcggcagatagagcgtcggctcgtcgatgccgtcttttgccatgcgcacggcgaccgcgtcgcgccatggcagcatcacgccgggttggccaaccgaacggttatagataccggtgtcgtatcctgtcatgccgaaatgcggcgcgtcaaagcccggctcatcggagaaaaatcccgcgagcgtgttgccgaaatactttgcatagtggtcgtaatgcggctcgtacacggcttcaatgagcttgtgcaccgattcttttgagagcatgtcgatatagtactttttgttttcttcgccgctgaacgtctcaaacacgaaaaatacgcggtaaagcccctcgggtacactgaaatatacgaatttatcctccggctgcacgtcaagctcaatcggttcgccggtcagctcttcatctttgcctgtgcggcgaaacagcacggcggaaacgagcttttcctccggcatgtgcattggcaccaagacggacgcttccgccatgggccccatcacgtccacatgcgattcccgcaggaattttcggcgcaggttcaggtcttcgtgctctaaaataccgtttgcgtagcccgtcgggaaatgcttatcgtcgagaatccacacgcgcatgccgcgcttttcggcttccgccaaaataatgtccatcgtcttccaccacgcgtcctcgcagaagtgttcatacgggcgcgattccacacaaaatgcgcggcaaccgctctcatagatcttctgtacgcgtgcgggaatctccgcgtcgtgcccgtcgtgctgccagaaaaacggcagcaggtagttttccgttttattttccagtatacttttcaaaattggttccatttgaattcccccaaaagagttttataaataaacctgtatcgacgccatcgcgtacacggcgaggtaatataggatcagtgcaccgtttttctgtgtgcccgtaatgccgcagatgaaatcccgcgcaacgaacaagtccgaaatgcagaacgccgctgcacccaacgcgaacagtatccactgcggcgagacagcaaacggcaacgtgcccgccatagctgtcatgaacgaaagcacgagcgggtacagcaccatcgggagcagcatagagccgagcgaatgcagatattgccgaaaaatcagtgcaatgatgccgtaaataatcaaagctgcaacgaccgtgccccaccgaaacccgccgagctgtgcaatatacccgataagcacaaggtgcgcgagtccgaacgagattacgccgaagcgaaaatcgcgctcaatgacaaaatccgcgatgcagcagaataaaagcgccaaagcgagcagccacgcgttcgccgggcgattaaacaacacgatgccgagcaccgccgtgatgaccgctacgaacgttgcgccgcactttgcggctgagcgccacatcgtgctgccgaacgagcgcgtggtattatagacgtaacagaacgagagcatcatcggcaatgagatgagtggccaaagcacacgaaacacgcgcataaaaatgcctccttttccacaattataacaaatgtccccgtaaaatcaagcaaaagaaaagccaccgacagaggatcggcaaaatccactgtcggcggcgtgttgacttgttaaatattacccatgaaagccgtagctgatgcaccagaagacgcacacaacggcaagcacgatgcactgcacgatgagcaaagcacgggaaatggtgcgcttattgatgccggagttcggggagaagctccaaacggcagccatgataagtcccaaaaccggaacgagctggatgaggaacatcatcacgcactcggaaacggaaagcgcaatggtgttttccggcagatattccacggcgcggccgggtctggaggaagcctgcacagcgttatcatacaaaaccggtgttacgccctggttataaaccgttgcgcagggggtctcgatatcggaacgaattctttccgggtccctcggctgtatattttttgtataggtttcattgagcatcataaaaggtctcctccttataaaacggacggttcaagtaaaaagtgtttttatctcgcggacatatttccgcgtctcttcctgtatacagaataacatgaaaagggcattttatcaagtattatctaaaaaaaggtaaagtttattgcgctgcttacgctttaaatgcttaaattgttcacagcatatacgcaatttgtccgcgatacaaatacactttgcaacttgataaacccggtaattcatgctattttaaaattgaccttattatacggcaatttttgagaaagaaggaaaaaatatgcagctttgcagtgtaaaagctccatgcgaagtctgaccccgggcgggtccgcatggagcgtttagccatgccgaaaagttatgtgaaagcggaaagcttaggaagacgatgtcgattgatttaacgccggtcagcggcaagggagctttcgttcgagacccgttaagatacggtgcggtagcagtttgtgaacagcttcgtattaaaactgcataatcctttacgggataatttgacagggattccaaagttgagattaaatattgacaaaatggtatgatattgttaagattacaagcaaggaaagcgtttgcgtactaattgcgcaaattgtgcaatcagcatgaatatggttaatatgaaaggggcggctatgcgacaaataacaataacggcagacaaaaaatatctgttgatcccggttgggaatgtgaaaggctggacgataccggcagagtctatacagtatttgagtatctatcaaaacggaagccttgtggaagaatatgaagtgtgcttggatgcttccccgcgttgctggtcctgtctgtatttggaacggtatgcgggcgaaacattggaattgcgccttgaaggcggagacgaatcacttatcgaacttttagaggtttcggatacgctgaaagatgcggatacgctttacagggaaccgatgcgtccccttgcgcatattacgccgatgcatggatttatgaatgacccgaacggtctgttttatttgaacggcaagtatcattgttttgcacagctgaatccgtacggtcttggcgttggcaatacgcattggatgcacatggtaagttcggatcttatgcactggcaagagttgccgtatgcgctgcttccggatgaaacagggcgcatgtattccggctgcggtgcggtagatctgcaaaatacctccgggctgggaaaagacgggataccgccggtttttctgttctatacacctgcgggcagtaaatcgcgctggagcagaggaaaatactttgaaatcgccgcggcagtcagcacagatggcgggatgcactttgaaaaatacgcacagaacccgatcgtgcagcatatcgcatatatgaaccgcgatccgaaggttgtgtgggacgatcagaaccaaaactgggtcatggtgatctttttggacaatgaccgctatatgttcctctattcggataatctgctgcattgggaacagggagaaacaatcaggatacgggggagcgcagaatgcccggatctgttcaatttgccgattgacaatgatatgacgcagagaaaatgggtgctttggggctctacggataactatatgatcggtcatttcgaggggcgtcattttgttcccgaaacggacgtgattgaaggtcccacgcatcggattgattcagcgtacagcctggaggcgcgctcaacgggcggatatgcggcgcagactttcgcgaacttgccgaacggacgcgtgatccagatttcgtggatccggacagtcgtttctcagggaccgttttcaagttgtttgagtataccgaatgaactgcggcttgtttcaacagagcagggaccgaggctcacggtaaagccggctgcggaggtgaaagacttgagagaatgcagctattcgtttgttggacgcggattggaggaatttgaacgtatcccgcgagaatacctcggtgaagcgatggatatgacattcaaattcagtatgaagccggataagctgattgcgttttccgtgcgcggcgtgctgattgtatatgatccgaagatcgagcgccttttgctgccggtgggagcatataagcttgcgttgaaagacgatacgttcgagctgcgcgttgtgacggaccgctgctccgttgaactttacgcggatgacggaaagttcaacctaacgttggcgacggtaccggacccgaccgatatttcgatacttccggtcttgttggatccgggtattgggatagattttgaagttcacaaattaaaaagcatgtgggaataataagggaggtctacagtttatgtttgaaaaggaaagcttttatccgtcagctgcattgaattgtgcaatcacagatacctcggtcagctttgatccgcagcttccgctcggcaataaagcaggaacatcactgagtccggaaagtgacagattgattccgccgggcattatgatgttaaaagacgggaaaatgcgcctgaactttatggcgccgggggcacaaagcgttacggcagaagtacaccgtaagatctatacattggaaaaaggcgatgacggcgtttggagcacggttgcagatggcggctgcggcggattctgcccggtcgtattccgtgtagacggcgcggaggtgctcaatcctatggcgcctatcgggtttggcgcttcaagacccataaactatgcggatattccgcagccggaagaagacttttacctgtgcaaagatgttccgcatggttcggtcgtgcaggaatattattattcggcagcgacgggaacgatgaagagctgcctcgtttatacgccagccggttatatgaaagagacttccggcgaatatccggtgctgtatctgcagcatggtcacggtgaaaatgaacagtgctgggtacatcaggggcgcgtgaactttattatggataacctgattgctgccggaaaagcggagccgtgtatcgtggttatgaataacggtatggtgcagaagaatgaaaacggcgtacgtgtattggatcagacgaggattgagcgacttcttttggaggactgtatcccgttcatcgaatcgcattaccgtgtgcgaacggataaatggagccgtgccatggcgggtctgtcgatgggatccatgcagaccagcatcgtgaccatgaagcatccggatatgttcgggtatgccggcgtatttagcggatttgtcggtccatttaataaaacaaatgcagaaaattcttatattcaattgttagatgaccgtgaaaaattcacacagtcctttagagtgtttttccgtgcttgcggagacgaagatcttgttgcgctcgagcgatttgaagcggatcgtgcgttgtttgaagaaaaggggcttgcgcctgcagaaaactcgatacatgtagaaaaaatgtatcccggtgaacacgagtggaatgtctggcgcatgtgcctgcgtgattttgctcaatatctgtttcatgaatgatacttttttgtttgaataccgataaaaatcgggatacagctgcgccgttaatcgcaattttgtgccgtgtaggtatggactgagctgcagcccttatgaaagcgtatgagggaaagttgacatgactccgggtatatgataatatagtgttattatatattacatattgcattagtcggtcaaattctaataggcacggcatggagtagctggaggttttgatatggcaacactcaaggatgtggcagagaaggtcggtgtatccattacaacggtctctcgggttatgaatggtcggggagcgatcagccgggaaacaagagataaggtttttgcggcaatgaaagaactcaattattttccgaatgagatggctcgttcgcttggcaataagtccagtcacttgatcggtttgatcgtaccctatattgatcacgctttttttggcatcctgacagctgctattgaggaagcctgctataaatccgggtataagctttttttctgcacatccggcggaaacccaaatcgagagcgcgagctttttaagatgctgtgtgcgaacaatgttgcaggcgttttggtttgcagccgtattacggatgaatctctgtatatgcagacggatgtaccgatcgttaccattgaacgcatgatcgaagacgtaccctctgtttcctgcgataattataagggcggtgtacttgcggcacaagagctgctgctcgcaagcggctgtaagtcaccgcttctattcggcaacaggattatatcgaatcagcttccggcatctctgcgatacaaggggtttcaagatgcttgtgcaaggaacggttcaccttgttcggagtattatatcgatgcagaggacctgtttggaaaaaaccttggtgaggatgtttacaaagccttaaagcaatttcctgaaacagacggtattttcgcgaccagcgacgttcttgctgcacgcatcatgaacacattgaatgatgcggacgaagccgacacttttggccgcatcccggtcattgggtttgacggtgttgatatttctacttattgtgagatcagcacgattgcgcagcctatacgccaaatgggtgcgcttgcggtgcagatactgatccaacgcataaacggtcaaattgtcccggagcgttctattcttccggtttctcttattcgccgtaagacctccggcccgaattttgtaaaagtataggcattaaatacgccatatacgtaaaacaaaaaatcgtatgattttagacatcgacctgaagatcgatgtcttttttttgtgtccgctaagagatgaaacggatttcccggtcatgtaagaagagatataaccggccttgctcgcagatccgagaatttgcggacggaaaagaggctttatcgttatcggaaaaacgagggaaagtcatatatctgctttgatgattataaataatgcatttgtgaaaccgtttgcactcacaataaaatgttgcttctgctaaaaaatctttgaaattccaaagtcgaatgtgctgctatggtgcaaaatcacaatatatacaaaaacacgatgaaaactttggtacaaaatttgttgacaaactataaacaacgtgataatattacaacacaaagcaaacgtttgcgtgagtattgcgcgagcggggaaaaacaaaatttaacggaggtacaaaatgtcaacgaaaaagattttggcagttctactggcgctgttcgtccttgcaactgcagtatccggctgtgggaacagcgggagcagttctgcagacagtcaatctggaagcagcgcgacatctgaaaacagcgcctctactgaggatacagcctctacagacggcgaagttccaaccatttccctgatggttgtctgtggcacgacgccgccggatgcagatgcggttgcggaaaagctcagcgagattacacgcgaaaagatcggctgcaacgttgagtttattacgatggagatcggcaacgttgcccagcagctcaatcttctcctttccggcggtgatgatacactcgatgtattcatggcaggcatttccgttccgtacagcacaattgtcaacaatggtcaggccctttcgcttgatacacttatggagccttatgcggaagaagtgaaaacagctcttggtgaaaaagtgtatgaatccggtcgtgtcaacggcgagctttacggtatcggccgtctgctggatcaggcctccacaacttgctacaaccttcgccgcgacattgccgaggaattcggctacaagaacggcgataaggttgaccttgcggagcttaccgagcttttcggcaaggtccgtgagaagtatccggatacaccgcttatcggtccgatgaatggcgtaccgagcattggagattcccgaatcgattctcttggcaacaagcttggtgttctggacaactacggccaggataccacggttacgaattattatgagagcgccggctatgaggagctcgtaggctacttcaagcagtggaaagagatgggctgctacatggcggatattctgaatgtcacagatgcgccgatcgattacatcccgtccggtaaggcatttggctgctttgcaagtcacttcagtgccgagatgaacggtatctggtcttctcagaacttcggtaccgatatcgcttccctccagatctatgaggatgcggtcgcgatcacgccgggggcctatgaatgcatcaacccggccacgaagaatccggaagctgcagcagctcttatctacttgatggcgaccgatcccgacgttgaaaatcttctgatcaacggtattgagggtcagcactatcaggtgctcgaggataacacggctacatacgttgatggcaaagacatttctaccacaggctggtgccttggttattcttggacggcattaaactctacgatttccattccgtttgaatatcctgcagattattacgatcgtatgcttgcagccaacaagaatgcacagcagtccaaggcttttggttgccagttcgaccttacaggcgtttcggatgcggtctccgcttgcacgaatgtcgtgaaccagtatgagaatgcattatccggcggtgccgtcgaagatttcgatgcaacgctcgcacagttccagcagggacttcgtgatgccggtatcgatgagattgttgcggcaaaacaggaacagctcgatgcatttctggcaggctgattctgaaataaaatgatataattataagactgggcctgctgcataaactggaaatatgtacgcagacccggttctatttcagaataaaagcgtcgccgtaaggcttatgtgcagttcgtttctccccggtatctatttcattttcagacatgtatcaaacggaaagacaagaggtaataaaatgtcaaattctacaagtcagaatagacaagggaaaattaagaaaaaaggcagctttacacgcaatctcccgctgtatcttttgatgattcccggtcttctttatcttatcatcaacaattatctgccgatgttcggcttgacctttgcatttaagaaaatcaactatacagtcggtgtttttgaaagcccgtgggtgggtctggataacttcacctatctttttaagacaagtgacgcctttgtaatcttccgcaatacactttgctataatctggcatttatcgtactcggtacggttttggcaatcgttgtggcgattttccttgagcaggtacgcacgaaaatgctgcgtgtttatcagacgagcattctgattccgtatcttctgtccattacggttgtcagctatctggcatttgcatttctcagctcggataacggttttatcaacaattcaatcttaaagctgcttggtatggacgagatcagctggtattcctcgccgaaatactggccttttatcctcacgttcatttatctgtggaaaagcttcggctattcgtctatcctctattttgcgactctgatcggcatcgacgattcttattatgaggcggcggttattgatggtgcttccacatggcagcagattcgtcacatcacgctcccgtgcctcaagaccacaatcattacgttggttattatgcacatcggcagaatgttctattcggattttggtctgttttatcaggtgccgatgaacaacggtcttctgttcagtgtaacaaacacaattgatacgtatgtttaccgcggactcctgcaactcaacgatgttggtcgttcctcggcagccggtttcttacagtctattctcggttttgttctggttatgattacgaatatgattacgagaaagatcgataaagaaagcgcgttgttctgattatacgggaaagggatgatactatgattaccacaagtaagtctgctaaaattataccgcatattgttctgataatcttaacgttggtgtgcttgcttccgctcttgctcctgttgatggcatccctcacggatgaacaaacacttatgctgaacggttattccttctttccggaaaaattcagtgcggatgcttatacgtatatctttaaaacaggaaaaacggttttgcgcgcgtatggcattaccttctttgtaacggcagtcggtacagtctgcaatgtatgcatgacggtatgcctgtcttatccgcttgcacgcccgggcctcaaaggtcgaaatgcgatcgcattctttgtgttttttacgatgctctttaacggcggtctcgtgccgacgtacattatgtattcgcagttctttcatattcgcgatacgatctttgcccttttgatcccgagttttctgatgagtccgtttaacgtaattctaatgcgcaattactttaaaacgaatatcccggatgcaatcatcgaagccgcaaagctggacggcgcaagtgaactgcgtacgctcgtcaacgtcgtattgcctatgtcaacaccgatcatcggaacgattggtctgatgtccggtctggcttactggaacgactggacgaacggtctgtactaccttgtaaaacgtacggatctgtacagtattcagaacgttctgacgaatatgcttaacaacattcagtttctcaaaaccgcaacgcagctgcagggcatcaatattgaaatgggtacacttccgagcgtcagcatccgtatggcaatcgcagttgtggctgttatcccggtcatgatcgtgtatccgtttattcagaaatctttcgtcaaaggcatcgtcattggcggcgtcaagggctgataaaagggagacagaacatgtctgattggaaaaaatacatggaataaagtgatgcttacgcagcgtcgctctgtaaaaaatcgcataaagtctacgatgtagatccttatgttatggtttttgaagatgaagatgtgcccggtatttttcatatctattatgatgcacacagcaagggcgcaagtgcgtggatgcacctgattgtcggacatgcgacgatcgtttatacaaatgatcgtatttaacgcgttttaaaaaactgcttattttggaggtaaaagtatggcacaaatccattgcaatttcttttcgtattcactttgtcacggcgttgatatcgaagtgacgcttccgtcttttacatcctgcaatatggatgatccgcatacacacagcttgccggggaagttcccggttgtatatttgctgcatggtaagggaaacgactatatgtcttggctccgctatacaagcgttgagagatatgcagaagaaaaaaggattgctatcgttacattctctgtcggaaacaaggcgtatatgaatgatgatatgggcgacaattactacgatttcctgaatcaggaacttcctgaatttgttgaagcctatttcccgatttccgacagtccgaaggatcgctatattgcgggcctttccatgggtggctacggcgcgttgctgcacggcattgagaatccggaccggtacagcgcgattggtgccctttcgccggccgtattctcgaaaaaggatatggaaagcaaaaagacgaaggggccgcagtgggtggatctttacgctgcgacagaaaaagctgtggcagagggtaagaagctgccggatctctttctgagcatcggcgacagagatttcctttataagaatgtgcaggaataccataaatttgttgaaccaatctggaagagcggccggctgcgctatgatgacctgcccggttatgagcacgaatttgccatttgggatcttgaaatcaataatttcctcgactggatcgacagaggggatgtctacaagaagatgggtgccaacaaagtgtaaagcaaaggaagacggcaatgaaaatttcagaaatcattgataaattagaagcatatcacggaccgctggagccggagcgcagaacgtgcgacatcgtgcaatacggcgatccggatcaggtctgcacaggaatcgtgttgtcctgttgcccaacggcagaggtcattcgtaaagctgctgagctggggtgcaatttaatcatcggccatgagcctcttttctacgacggatggaacgagaccgattggcttcaggataactgtgtgtatcaggcaaaaaaacaacttcttgaccgtctcggtatcgttgtatatcgcgatcacgatcatatccacaatcatagacccgacggtatcttttccgggttggctaaaatgctcggctgggaacagtatcaggagacggaaaactattttccgggaactgcgtaccacttgccgctcactacggtccgcgcggtggcggagcatgttgcgcataccatgcagattgacggaattcgcattataggagaccctgaaatgcctgtggagcgcgtagctatcgtcggacattttttcggaacggactgggacaggcaaaatatacagctcattgaaaaaatgaattgcgatttgatcattcccggtgaggtgatcgattggacaatcggcgagtatgtgcaggatgcaaatactttgggaatccgacgtgcgctgctgaatgtcgggcacttcaatttggaagaacccggaatgcggtatatggcacagtggttgccgaaagtgcttgcgtgtgatcttccgatccattttgtacaatccggtaacagttttagctggctttcgttcaaaaaggcagaagaaggcaagagattataaaaatatggaggtaagtaaacttgactgcagatttgatgttgacgcttgaaaaagccatgcaggcatggcagcccccggaaattccggaagatattccgcagggagatactccgggagacaaaatatggattggaccgcagcagaaagaaaaagccgcaaagatttttccggtagttttacctatgctgcgcgaagttctggaaaaatcaccggcaaaacgagcggttattacggtgtgcggtggatccggcgtgggaaaaacgggtatttcgtcccttttaacatactattttaatcaactcggaatcgggtgctatacgctgtccggcgacaattaccctcgtcgtattccttctttgaatgacgcggagcgtatgcgaattttccgtttagcaggcatacgcggtatgctggaacagaatgtttataccccggatgctgcacgtgaacttaaagtactgcaggaagcggaaacggactctgcgtcaaaagaagcagacagatacccgtggctgaccgtatatcaaaaatccggtcgaaaggcgttggcggaatatctcggttccgaacaggaacaggagtttgatgaactgtccaaaacgctgacacagtttaaaagcggtgcggataagatatggctgaaaagaatgggccgcacggagacggagctttggtatgaagaaaagaattttcggaatatttcggtgattattctcgaatggacgcacggcaattgcggaaagtttgacggtgtggatattccgatcctgctgaacagtacaccggctgaaacgagagaataccgtctgcttcgtgctcgagatgcaaatacagatacgccgtttattgctatggttttggagatagagcagggtatgttagaaaaccgagcacaagctgcaaaaattatcttgtcaaaatccggcgactttttaacttacgaacagtttaagcggcaaatggacgccggccgataggagatattgtatgtgtgacggtgatttctgccttggcccgatgctgaatgcttatcctgacagcttgggcggcacattaaaggaatgtatatcgtttttggaacagccggaaatgaaggacgtattttcttcgttctatattcttccaagcctgttcaacaccgatctggatcgcggattttctgttatagactatcgactcaatgacttgctggcagaacaaacggatctcgatgcgctgcgctcaatgggaattgacttgaagttggattttgtactaaatcatgcttcggtgctttccgagcaatttcaggatatactgaaaaacggggaacaatccctctatcgtgacttctttatagattggaacagattttgggcaggtcatggaacgatgaccgaggagggatatatccggccggaccccgaactgctgcaaaatatgtttttccgtaaacccggcttgccgattttaatggtgaagtttcctgacgacagcaatgttccgtattggaatactttctatcaggaagttgtctattcccatgtagatgcgcaggactttatggcaatcacacacggaaaatatgctccggcagttcggttggcttctttggtcaatgcggctgtcgagcagggcaaatggcccgagcagacggaacttggtcaattggaggtgtatcgcggtgcggtggttgacttcatggaaagaaatcgtcgatatttgggtcagatggatctgaatatccgttcaccgctcgtttgggaattctacaaaaatacgctgcaaacacttgccggttacggcgcaaaaatcgttcgtctggacgcctttgcctatgcaccgaaagagccgggtgcacggaatttcttgaatgatccgggaacatgggagttgctcggcaaggtgacagatttggcaaaaccgctgggtatcacgcttttgccggagatacatgccagctatgcggagggaacataccgcacgattgcagaaaaagggtatatggtgtatgactttttcctacccggattattgctggatgcacttgaacgaaggtccggagaagttcttgtacagtggatacgggaaatctgtgaccgcaaaatgctgactgttaatatgttgggctgtcatgatggtattccgttgttggatttaaaagggttgctttcggaagaaagaatccaaagcctcattgatacagtggtgtcccgtggtggatatgtgaaagatctgcacggcgcaaaaaacgtatactatcaagtaaatgccacgtattacagcgcgctgggagaagatgacaaaaaaatgcttctggcacgggcaatacagcttttcatgccgggcaaaccgcaggtttggtatctggatctgtttgccggtcgtaatgatcatgctgccgttcaaagggcgggtgccggtgggcataaagaaatcaaccgcacgaacctgacatgctctgatatagctgccggaatgaaaaagccgattgtgcaaaaacaaatcgagcttttgcggatgagaaaccggtttcctgttttttctgcaaatgcaaaaatcgtggctgaagtgaacggaacaaaaatggatattcgttggcaatccggctccgaagaagcggttctccaaacagatttcggcgattattccttctctgtctccattcgagatacgtcttccgatacagaatatttcaagtacgattcgtaatgtgtatggcgatttagccggaattgaaaataagatgcactgagaggtacgattttatcaaaaaagtcttggcgactgtttgcagctcctgctgtgtcgccaagactttctttatgcttttaaagcttaataataccgaatgaccgcgataaccttgccgagaatggtgatttcatcggagatgatgggctcgaaatccgggttttcgggctggagacggaacgtgcccttctccttatagaagcgcttcacggtggcttcatcgccgatcatgccgaccacgatctcgccgttttccgccacgggcgttttctctgcgatgacatagtcgccgtccagaatgccggcgttgatcatgctcaggccgtccacgtgcagcgcgaaaagctccttgccgcttttgtccgggtagggaatatagccctcaatgtcttccacggccagaatgggcagaccggccgtcaccttgccgagaatcggcacctgctttgcggcagatgcgcccacaatgtgaatggagcgattcaggcccgcatcgcgtgtgatatagccaagcgcctccaaagatttcaagtgggaatgcaccgtagaggtggagcgcaaaccggtcgccgcgcagatctcacgcacagagggcggcacggcacgttccgccatggtggagcaaagatagtcatatacaagctgctggcttttcgttaaactcgccatatgcgattcctccgttttaatacaatatcagtcccgtagaaatgggcagttctttaattaaaaccattgtatcatatattttcgaaaaatgcaaacgattgtttgctttttctgcggattttctcgaaaaaagcgttcataaatgcgttccaaaatctttaacgtttattcatggctatttaacaactctttttgaaaccgcggtataatataagcgtattcagaagaaaaggaaccgcacctttcttggatacatgttctaccctcctcaatatacccctcaagctaaaaggaagaaggaccgagccgcatcggtccttcttccttttgtataatggtattttcagcgcggagaagtgccgattttgcacagcattgaaactgaaagtttccgtctgccgaaaatccgcggactgaagtatagttgcatatttttctcaaacccgcccatactacgggtaaagaaacccaatgacgctaaaaacaggagagaaaaatatggctatgcactttaaaaagcaggaaaaaaccgaagcggagcgcaaaaagagtacggagcggcgcgggttttaccttgcgcttgccgtgtgtctgacggccatcggcattgcggcgtggagcacatacgataccgtttccgggttcttggagcccacagggagcgagagcagtgcgtcttcctccgcgtccacaccgcgccccacgcctgaagcatccgcccccgtagacgatgacccggagagcgccgtttctgcgggccacgcgcagggcactgtgccggaggtctccgcaagcacagaagcggagccgcaggaagtgaacgctcctgcagaagaaacgcccgtcgaagagaccgctgccgagccgacgtatacggtcagcgaaacgctcacccgaccggtgccgggggaggtcatgacggagttttccgatacgccggtatactccgaaacgatgcgcgactaccgcgtacacgcgggcacggattacaccgcggcgcacggcgaaaccgtgcacgcctgcgcaaacggaatcgtaaaagagacgcatacggacatgctgcgcgggaatatgattgtgatagagcacggcgattacgaagtgcgctattgcggactcggtgaaacgttcctcgtgcatgagggcgacgttgtcacggccgggcaggacatcggcagcgtgaccgccgcgccgtttgagtccgcgctcgattcccacctgcatatcgaagtcaccagaaacggcgagccagtagacccggaatctgtcttcggttaaaattgagccaaactgcccccggcatcgttttaggggcgcgtagcctcggtgtaaaaatgcaccggggctgctttttgctgctcaaaaatattttgctgtttacaatttgttccttgatttttctggtttctcgttctataatatagttcaaaatagaacgaaagtaagtgagtatatgatcttttgggagcggcaaaaatctcttacggcgttttacgaagcgtgcacaaagccggtgcgtgatgcatacgacctgacgcagatgcaattcaatattttaatgttcctgcacaataacccgcagtttgatacggcgggcgatttagtcaaaacgcgccacctcacaaaatcgcacgtttcaacggcgttaaaggaacttgaagcgcgcgggtggattgaagcgcattacgctgcgggcaaccgcaaaagtcaacatttacgcatcacgaaaagcgcagaagccgtcatcgcggcgggaaaagcggcgcaggaggtgttcggtaagcagctttttaagggcttcacaccgagagaaaccgagcagtacaaagtgttgtttgacaaaatgtgcgaaaacgccgcagaaggcttagcggaaacggaaaggatgaactgatatggagcttttagccaaaatcctcgtctgctttttggcgggcgcgggcgcaggcatcggcacaggctttgcgggcatgagcgccgccgcggtcatcgggccaatgcttatgacgtttctcggcgtcccggcgtatcaggcggtcggcatcggccttgcaagcgatgtcttggccagcgccacaagcgcgtggacatataagaagcataaaaatcttgacgtcaaaaacagcctgccgctgctcatcggcgtgcttgttatgacattagtcggcagttttgtcgcaagtctcctgccggagcgcgccatgagcggcaccatgcagatcgccatgatcttcatcggcttgcgtttcctcctaaagccggtcaaaacgaccaaagagcaaatggctgcggccacgccgaaggaacgcctcatcaaatccatcgtcggcggtgtcctcgtcgggtttatctgtggcttcgtcggcgcgggcggcggcatgatgctgctgttcgttttgacgtcgtttctcggctatgagatgcacatggcggttggcaccagtgtgttcatcatggcgttcactgcgctgaccggtggcatcagccacttcgccatcggcggcatgccggatgtcacatgcctcgttctctgcgtcgttttcacgctcctttgggcgaagattgccgccgccatcgcaaaccgcgccagcgccgtcactctgaaccgcgtcgtcggcatagtcatgatcctcaccggcatcgtgatcttgcttgtgaattatgtattttaataagtaatctcctccataaaaacgagacctccgaagcacgctttggcacttcgggggtctcgtctgtttaagctttaatactcataatgatgcgcttctttcagcatcatgtctttcaccttcatcaggcggatctgggtggagcgctcgttttcgtcaagcttcatcgtgatgtacttgatgttcgtctgcagctccgggatcatgacgtgctccagcgcgttgacgcgacggcgtgtcttttcaatctctgccgccatcaactggcaggatttttccacttccgccagcttcagcattttcgggaagacctcggaaagcgaaaggatcgcgtcgtcaaggtcgccggtcgtaaaggcgaagccgtaggagtacatgtcgttctggtccggtgtacgcgtcttaaagtcaaaatccggaatctccacgctcatcacgttctgcgtgccggcggaaatcgtcagttcctgcttcggcgcaagcagcgcggtgttcagcatttcgtccggcataccggcgcgcgccagcatgaagttccggttagcggagacgagcgccgtttccacttcttcgcgcagcgctttgttttcgcgcaccttatcgaggaactggcgcatcagctcgtcgcgcttatccttcagaagcttgtgcccgcgcacggcggtgacgagcttctttttcagccgcgtcagctccattctggtggggtttacctgggtgcctgccaccgcgcatcacacctttccgtaatactggtcgaggtacttgtcgtcgattcgcttcagttcgcttctgggcaggatggaaagcagcttccaaccgagctccagcgtgtcttcaatgtcgcggttcgtgttatagccctgcgaaacatactcgttttcaaaggcgtccgcaaacttcgcgtacagcttatcgatgtccgtcagcgcggcttcgccgaggatgaccatgagctccttggcttctttgccgcgtgcataggcggcaaacagctggttcatggtgctcgcgtggtcggcacgagtcttgccctcgccgatgcccttatccttcaaacgggacagcgacggcagaacgtcaatcggcggcgcgatattcttgcggtacagctcacggcttaagataatctgcccctcggtgatgtagcccgtaaggtccgggatcgggtgggtcttgtcgtcttccggcattgttaaaatcgggatcagtgtgatggaacccgtcttgccgttctggcggcctgcgcgctcgtacagggacgctaagtccgtgtacatatagcccgggtagccgcgacggcccggcacttccttacgtgcggcagagacctcacgcagcgcgtccgcgtagttcgtaatatccgtcatgatgacgagaacatggtagttcttttcaaaagcgaggtattccgcagcagtcagcgccatgcggggtgttgcgatacgctcaatggccgggtcgtttgcaaggtttacaaacatgaccgtgcggtcgatggcgcccgtctcgcggaagctttcgatgaagaagttcgattcctcaaacgtgatacccatagccgcaaacacaacgacgaacgggtcgttcgtgccgcgcaccttagcctgacgtgcgatctgtgcggcaagctgggcatggggcagaccggaagcggagaagatcggcagcttctggccgcgcaccagcgtgttcagaccgtcgatggccgaaacaccggtctggatgaattcctgcgggtagttgcgggccgccgggttcatcggcagaccgttgatatcgtcgcggcggtcgggcaaaatctccgggccgtcgtcaatggggcggccgaggccgtcgaaaatacgacccagcatgtcttcgcttacgcctaattccatcgttctgccgaggaagcgcacgcgactgttcgaaaggttgatgccggtggagctttcaaaaagctgcaccaacgcgttgccctcgttaatttccagcaccttgcagcggcgcttttcaccgtttgcaagttcaatttccgccagctcgtcatacgttacgttttcaacgccctttacgagcatcagaggacctgcgacctcctgtatggttctgtattcctttggcatcagaagtcctccttgttttcaatggctttgtcaatctgctgagagagctctgcgcagatcgcatcgtattccgcggagacccggtcgttcgccgtgtatttaaagcggcctattttttcgcgaacaggcagcgcgatgaggtcgtccaccttcgcacccttgtcgagcgccgcaacgcactggtcgtagaagtgaacgaccagcagcatcatgtcgtgctgcttttcaaggcttgtgtatgtgtccgtctcatggaatgcgttctggtgcaggaagtcttcacgaatggagcgtgcagcctccagcttcaagcggtcaggcgcggaaagcgcgtccataccgacaagctttacaatttcctcaagctctgcttcgtcctgcaaaatgcgcatcaaacgcgcacgcagatccatccagtcctccgccacgttcgtgttgaaccagttcgccatcgtgtccacataaagggagtaggaagtcagccagttcacggcggggaagtggcgcttatacgcaaggtttgcatcaagaccccagaagaccttaacgatacgcagcgtcgcctgtgaaaccggctccgaaatatcgccgcccggaggggaaacggcaccgataacggaaagcgcaccctcacggctgtcgctgccgagcgtaatgacgcggccggcacgctcgtagaactgtgccagacggctgccgaggtacgccgggtagccttcttcgcccggcatctcttccagacggccggacatttcacgcagtgcctccgcccagcgggaggtggagtctgccatgagggctacggaatagcccatgtcacggaaatactccgcaatggtgatgccggtgtaaatggacgcctcacgcgccgcaaccggcatatcggacgtgtttgcgatgagcacggtgcgcttcatcagcgaatacccggttttcgggtcaacgagctccgggaactcgtttaaaacgtcggtcatctcgttgccgcgttcgccgcagccgatgtacacaacaatgtcggcttccgcccactttgcaagctgatgctgcacaacggtcttgccgctgccgaacggacccggtacggccgctacgccgccctttgcaatcgggaacagcgtatcgataacgcgctggccggtgatgagcggcatatccggcgaaagctttttctggtacggtctgccgcggcggacaggccacttctgcatcagcgatacgttcacactgctgccgttcggcgtgtcaatgactgccacggtgtccgttacggtgtattcaccggcagaaatggagcggattgtgccgcgcacgcctgccggtaccataatcttgtgcagcacgatctcagtctcctgtacggtgccgagaatgtcgccgccttctacttcgtcgcctacctgtttaaggggcgtgaagctccattttacatcgcgctttaaggagggaacctccacgccgcgctttaagttgttgcccgtcatttccataatggcggtcagcgggcgctgaataccgtcgtaaatggagctgataaggcccggcccgagttcaacgctcatcggctcgccggtggattccacaggcgcacccggcccgagaccggaggtctcctcgtaaacctgaatggaggcctcgtctccgtgaatttctatgatctcgccgatcagtcgctggtcgctgacgcgcacaacgtcgaacatgttcgcgtcgcgcataccgcctgcaactacgagcggaccggctacttttttgattgtgccttggctcatgtgcttagtcacccgtttcgttaatcgttgtcgttaaagataatgtcggagccgactgcctgctccacggattttttaaccattttaatgcccatgcccgtgttgcccgtaacgccgggaatcgggatgatggcgggcagcggctgcaggcggaagtggtccagttcgtgctccaactcggcggcaagcgcttccgtaatgtagattacggcgtattcgccctccgctaagcggcgcagcgttttggagcccatctccgaatccgtcacgggaaagacctctagaccgagcgcggcaaagccgtaaatgctgtcgcggtctccgatgactgctgctctgtacatttcgtttccctctttctttacaggtctctcaaacgtgcacggatgcgctcatccggcaggttgttctgcttgccggagataataatgcgcacggtagaaatctcgttttggcgcgccgtaacatacccaagcagcggcgccaccgtaaagtaatcctggcggctgatttcttttacaagcgctgtctggcggtcgtcgcaccatttttcaaacgcggagaagccgtccttcagcgcctttacgccgtcagcatagtccgtacgggaaaggtacgcgtaaaacgtgtccgtgtctttcgacgccgcgtcaatgagctcttccagatccagtgtgtcgcacggggcgaggctttcttccaaaaacgcacggcttttgccggtgtgcaaagcgcgtgccgcgattttaatgtccgccgccgccaccttaaactcggaaaacgccgtaatcagcgcgtttttgctctctttaccggtcttgtggatcgccgtgaggcatgcgcggtctaaaatgatgtcgcaccgctgaccgtcgcgcgtggtaagcagcgcgtccgtcgccttttttgcggcttccgccataaagtccggcagaagggagaagtcattttctctgaccgcctgctgcattttttccggctccacggtgccgccggacataaacacgttgtgcggctccgcgtttgtgacggtgcacttcaccgccgctttcatattgttgaagtctatgggatacagcagtacgctgaacggcgtgaggtcgggcagcagctcgtgcatgagtgcccacgttttctcctcctcggcggcaaaaattgcctcggcagaggtttcgccgccagcgccccagcccttatcggccagtgcacggaagcactctgccggcgttttgcacgccatcagcctgtccagatcctgctgcgtcaaaagcgaaagctcccgcgctttaatgcgcgccacagcatagatgtattcctgttccattcgttaaaccaccttttctgccggcggctcagcgaaagagcatgccgcccgcaaggtcctgcaatgtgtctccggcggcctcaaacagcgaagcgaacgtacagttcacgtcgatgccgccgtaaacgagcaggaaaccgtccgggatattgcacggcgtgttcgatacggtgatgttcgtcccgggcacagccattttcagctgcgccgaaaaatcctgcggcatgcgcgcaaggtctttttcgtttaactgcatttcagcatcgcccggcagcgcgtttttctgcgcaagctttaaaagcacgctgaagtattcgtcatccggcagatcgtgcaactctttctgtgccgccgcgattacatcgcgaatggcgttctgctttgcggcaagcacggtgcggcggcgtgtgaattccgcggtcgaagccgcacgggctttaatgtccgcgccgactttttcactgtccgcaagcaggacatttgctttctgttctgcctcggcggcagcgtccgcaagcgtcttttttgcttcttcttccgcagcggcaacctgttccgccgctttcgcttcggcatccgcaaggatctgttctataattctgtccagtcctgttgccatgggtcgatcctcttcctttcttttttggatttttgggagtggatcatcagatggcgatgccgccgatgtttgcaacagccaacagggaaacgagcagagccagaaccgcgtaggtctcaaccatggctgggaagatcatggctttaccgaactgatccgggcgctttgcaacgagtgcgatggaagaaacggctgcctttgcctgctgctttgcggagatgagaccgatcacggccatcggcatgcaggctgcaagatagagaagaccctttgcaaaggagatgtctgcgctgccgcccagaacgccgatgttcgtcagcgtgaggaaggcgatgagcaggccgtagatgccctgcgtacccggcagaagctgaagaataaggactttaccgaacagcgggggattttcggaaacgacgcctgcggctgcctgaccggtcatgcctacgccgatggcggaaccgatgccgccgagaagtgctgccagaactgcgccgacaagcgcgagaacgatgccgagagagttgatatcgaacttatccatgttatttttcctccgtaattttgaaatatttggttttggtggtgaacggtgcgaatttgcgtccgccgccctcaaagaatttgccgaagaactcaacaaactgtaagcggtttgtgtgcacatacgcgccgagcacattgatgccgatattcagcgtgtgtcccactacaaaggcgaaaataaagataatcacgccgagcgggttgttgccgggcatggcgcccatctggttgaagaccgaagcgataacgccggttgcaaggccgagagccaaaagtctcgagtaagagagaatgtcgcttaaatagctcgaaacaccgtacagcccgtaaagaccttttaagaagcgcttgccgatgctcttggagctgcggcccgaagtgagcacaatgcctaccgcgccgatgcctgccgcaataatgcccgcggtgcccaccgatgccggcagcgtaaaggaaagcgccaccatgtcggcgaacatctgcatggaaagcagataaataatcgcgccgccgacgagcagataccagaacacaacgtcatagatcgcgtccagccacttgccctgttttgcaagctggtagaactgtgcgccgaggccggcgaacaggtggatgatgccgacgaggaacgagaacagcaacagccgcatcggttcatcgaccggcgtgaaccacaagggtggtatcacgatatcggtgttgaagaatgtctttgcgataacggtgattgcgtcaccgaagaagctgccgaacaaaatgccccagaatatcgtggaaataccgcaatagaggaacattgtcagcgtcttgcgcagaccttcttccatgtttttgaacttgtgtaagatgatgccgcagccaaggaccatcacaagtccgtagcccgcatcggaaagcatcatgccgaatagaaagtaatagaagaccgccatgatgccgcttgggtcgatttcatgcttgcccggcatgctgtagctttccagcacgccctcgaccggggcagcgaacttgttgtttttgagctttacgggcacatcgtccgcgtcactcgggtcgcacagctccacgtaggcttcttgcgtggtcgtgagctccgtcttaagtgcctcggcgttctctgccggaatgtatcccgtaatgagaaacacgtgcgggctttgccataagcggcccaaaacgtcgtatttctcggtgcgcatcgtaaagtaatcgatggtgtaaagcaggtcttcgcgtcggtttttatgtgtgcgaatttccgcttcgtttttatcgatctctttttgcagcgccgcaatgcgtccgttcagaatgtctacgcgctctgcgggcggcaccttgctcggctccgccggatacgtaaacccgatggaacgcaggtaggtttcaagctttaatccctgcgagatgtggcacatcaaaaacgcgcatgtctgctgcggggaagcgctcaaaatctccacgaccacaccgtccacgtccggcgcgccttcggcgattttcgcccgcagcgtttcttccgtgtattctaccggaaacgaccccgtgaacacggaagttgtcggcgtgctgatggtgcgcatggaaatatccagcttcatccacggctccagcgcacggatttgtgtttgcaagcggagaatttccgcgcggttgtccgcacactttttccacagcgtgttgatgcgcgaggcaatttttaaaagctcgcctgcaccgtcagccgtttcctgatatttggaaagcggtatcgcgtcgcgtccgttcagagacgcgaagaggcttttttcgggcggctccagtttatcgagcgcgtctaacgccgattgcagcgcggctgcattgttttcaaatcttgattttgccgggacggtatccatcttggcaaaaaccgtttcatccgctttgcggtcatcgatttccacgacgccgcgccgctggatcagttccaggatctgtttacgacggttcttgagcgcataaatgctgatgcgcttcataggcattaccgccatagggggatcccctcctttcgtgttggcgccgcgtcagccggtgatggcctcgcggatagcgcggattacgttcgcgctgttttgctgcgcttttttgcggatatcctccgccagtgcggcagtttcctgctgcgctgtgcgttgttcggccgcagcggccgtctctgcgctttgttttgcggctgcaaggtccgcttttgctttctgcatgcgctccgtcttcagcttgtccgccttttgtgcggcgtcctgccgaatggcggcgcagcgtgcagcggccgtgtccagaatgccggcggccttctgctccgcatcctttacggcgtccagagcttcttttgccaaaaaatcacctcctgcttcattattttcaaagagcggcggcaaaaggggtaaagacccgctttttgcaccgtaggtcataacataatacgcttccattataatattatttgcggaattttacaagagattttacgggagttttctcgaaaaagtgctttcatatcgataataaaatagacgttttgacgaattcgtctgccttttaacattccgtccataaatggatctttttctttgtgtaacccacacgttctcttacaagtttcttacaaaaattcacattctgtttatgattttttttgaatccgtgttataatagaaataatcacttaatatggataacgggtcggtgtggcccgcgaacttacaggaggcagtcaaaatgaaagcaaagtcccttcacttttccaagagcggcaacgtacagccgatcgcatccgaaatcggcagagttatgcagtgcgtatgtgatcagatccccccggcatacccgtgcgagggcgagaaggtcgtttttatcggcgttgaaatgaacggcaagctcccgggcgcagtcgatcacttctgcaaggatctcaaccccaccagagcaaagggtgtcgcattctatgttctgaacagcaacggtaacacggacggtctttcttccatcatcgatacgatgaagaagaacggcgtcgagacttacggtgagcctctgggcatcgctgtcaagggcggcctcttcaagaagggcatgccgaccgacgcagacaccaagaaggttctcgagtgggcagacaagattgcaaagatgtaatttctttgataaaacagcctttataatttttcataaaaaaggatggcgcatgctgtcctttttttctgtttttacgggatatacaaaccccgcttgcggtggtaaactgtatgagaaatctttgaatgttatttttcccgtaaaggtgtgaaattttcagtatgacaaaagaaatgacgagcggttcgcccatgaagcttatcctcgggttctccatcccgctgcttttcggcaatctgttccagcagttctattccatggtcgataccatgatcgtcgggcgcgtgcttggcacggggccgcttgcggccgttggctccaccggctccatcacgttcctcatcatcggcttctgccttggcctttgcagcggctttgccatcccggtggcgcagcgtttcggcagcagggattataaagagcttcgccgcttcatcggcaacgccgtatggctgtgcgtcggcttcggcttcgtcttaacggtgctcacggtcattttctgccgcaatatcttagagctcatgggcacgccggcggatatcatcgacgacgcttacgcgtaccttgttgtcatttttgccggtatccccgcaacgttcctctataatatgcttgccggcatccagcgcgctatcggcgacagccgcacgccggttgtcatcctcgtcatcgcgtccatcatcaatattgtgctcgatattgtcctcgttgttttcatccccatgggcgtcgcaggcgcggcggtcgcaacggtcgcttcacaacttatcggcggcgttgtatgtctcctctatgtgagcaagcattatgaagtcctcaaaatgacccgcgaggatttcaaaatcaacgtgccgtgcatcaagcgccttttaagcatgggtctgcccatggcattgcagacatccatcacggctattggcagcgttattttacaggcatccgttaactccctcggctctacggtcgtcgccagcatcacagcgggcagcagactctatatgttcttcgcctgcgcttatgatgccatgggcgtcaccatgtctacatacagcgggcagaacatcggtgcgcgtaaaattgaccgtattgggcagggcgtcaaagcctgcaacatcgtcggcatcatctattctgttctggcactgctcatcatcgtgttcctcggcaaatggatgcttcttctgtttgtcgatgccggtgagaccgccattatcaattctgcctattggtaccttgtgtgcagtggcctttttatgatcccgctgacattcgtcaatgtgctgcgccttaccattcagggcatggggtacagccgcctcgcgctctttgccggtgtgtttgagatgatcgcccgcggcggcgtgggtctgttcctcgtgccgctgttcggcttcaacgccgcctgcttctccggcccgatcgcatggattttagccgatagcttcctcattcccatgtattaccacgtcatccaccgtgcaaaacgcggcgagggtatttactaaacaaaaccaaaaccgtcctgcacgaacaaaatatgcagcacgaagagcttttagtttgctacccggagcattggtcccggctcgtcaaagccattatcgattgaattccaaagccgctgttttcgacaagcttaaaatcccgttcacgaaagtgaacgggattttaagctttctgttattacgcgttctctttaagccactccaccgcacaatgcgccatgcacgccgcgccgatagggaggacgtcctcgttgaagacgaccttcgggttgtgcgcggtgtactgtccacgctcgtccatgtagcccgcgccaaggtacatcattgcgctcggcacacgttcggccacaagggcaaagtcttcggagcctgtcgccgaaatgccgccgtacggcgtaaagttcggaatgttcagcgcgcccatgtagcgcagcatgtcgtccgtcaccgatttgtcgcacacgagcgggcacacttcggaaagcgtccggatctccactgtcgcgttatacacggcagccgtgcgctccgccgtctcgcgcatgcggcgtacaagcagtgcgcgggcctttttgtcgttcgtgcggatggtgccgcgcagcacagccgtgtccgggatgatgttcgcggcggttccggccataaactgcccgattgtcaaaacgcatgtctttgtcgggtcgctttcgcgcgcgatgagctcctgcaaggcgaggtgaatgtgcacgcctacgttgatggggtcaatggcaaggttcgggttcgcaccgtgcgagccgcgcccgtgaaccgtaacctcaaatccgtctacggaagccatcatcacgcccgagtcgttatacatcacaaagcccacgggcgatttacctgccgccacgtggtacgcgagcgccgcatcgaccggcgggttttcaagcaatccgttttccagcatatcgcgcgcgccttcgaatgtctcctccgcgggctggaacatcaatttcaccgtgccgcaaagcgcgtcttcgttttctttcagcattttcgccgccgtcagcagcatcgccgtgtgcatatcgtgtccgcaggcatgagccgtttcgccggtggggcaggcaaacggctcgccgctctcctccggcatcggcagcgcgtccatgtcggcgcgcagcaaaagcgttttgccgggcttgccgagtgtcgctgtcacgccatgtccgcattctgtcggctttaggccgtattcgcgcagcttttccgtcacaaacgcctttgtgttcggtaggttcaaccccacctcggcattctgatgaatacgcctgcggttttgggtgatctcgtctttcagttcctgtgcccgtttccaaaagtccatagtctcgtccccttttaaaaaattttgtaagcaaaaaggcagcatgaagcaatacccatgctgcctttattttatgatttactcagcggaagattcagaagaagtctcactcgtctcggaagaagtttcggaagattccgcactgctctcctcggaagaagcgctttcgtcgctgctttcagaagcgacggaagacgtgccgttcttcttggtatccgcaaacatggagggcttgtagcggttcagtaccttctggttccattccacgccctcaaagctctgtgcagccgcactgacagcatcggcgtattcggtattcttcagctcaagcaaaagctgcgagcggttgtcactgctctccagcagcgtgtcttcgtcctccttgatcggcagacggtgcagaacgatcatgtactttgtcgattccacgacctccacgtcgccttcgttcatctccttaatcgcagagatgaacgcgtccggcatgtagcttgactgcataccgttttcgtccttgatgccggtctggtaggtggagtcctgctgtactttgagcgcatagtccgttgcagcgtcgtttacggtcattgcaccggattcgatcttcgtcttgtatttttccagtgtctccttgaggtcggccttttcctcgtcggtcaggtcaacagatttattgtcatcatccgtcttcgtcagcggcgcagagaaatactcgtagtcgtagtaatcgtcctcaatgtgctggcgcagctcgctttccggcacttcgttttcgccgccctcgccgtacagcgcgttgaagaccttaaggtacattctgttatactgggaatacgcaatgtcaaaggaggtttttgcgatgccgaacttttcaaagctcgtgccgaagtagttccagtagctctcggtggtctggaggcatgtgctgtaatcctcgtcggtcatttcaaggcccagacgcttcatttcgttctgaatatagaaatactggttcacatactcatccgcgcggtttttgatccacgtctcggccggcgtgccgtcgatttcgcacttcaagacctcgtcttcggtagagaccttggaagccgcttcattgtacgcaatggagaggtagtaaatgtatgcgccggcaggcagctcggtgtcgtcgtactttgcggaccagttcagatcctcatcgtagcagcccgcaaggctgaagcacatggcaacggccaaaagcagcgccacggtaatctttgcgattcttttcatggtgtttgttccgtacctttcttaaatattgcggacaaaatgcccacaaaggtttgctgttgttcattataccgccgatacggcaaaatgtccagttattttgtagcgggtttcggcgctttcgcgtcctcatcgccgcagagaactttcaaaacgtcctccaaaacggtgagcggcgccttgccgcccagcgccacgctgatgtacgggcggctgccggcggagagcatcaccttgttcggcataccttgaatcaggcgcttcacgcgctccatgtcaaacttatctttgtagagcagaagcgcgtttgcctgctgcttgacttccgtaatgccaagctgtgtcgcgcggttgcgcagcaaagcaatgtcgataagcccataaacgctttcgggcggctcgccgaagcggtcaatgagctcatccacaacatcgctcgaatcctcatacgttttaatgtctgcgatgcggcggtaaacgtccaaacgcagcgcggtggaatcgatgtagctttccgggatatgcgcctgcacctgcatgtccacggtgcattcctccacggggttctcgggcgcttcgcctttcatcatggccacagcttcgtttaagagcttcaagtacatgtcatagcccacgctttccatgtgcccgtgctgctcaccgccgaggatattgcctgcgccgcgaatctcgaggtcgcgcatcgcaatcttaaagccggagccgaactccgtaaattcgcgtatcgccgccaaacgcttctgcgaaatctcactcaaaaccttgccgcgtgtaaacgtaaagtacgcgtaagcgcggcgggtgctgcggcccacgcgtccgcgcagctggtgcagctgcgaaagtcccatgcggtcggcgttgtcgatgatcagggtgttcgcgtttggcacgtccacgcccgtctcaatgatcgtcgtgcagacgagcacgtcaatttcatgctccatcaaacgccgccagacttcggagagctcctgctcgctcattttgccgtggccgatgccgatcctcgcctccggcacgcgctcgcgaatacccgccgccacgcgctcaatcgatgctacgtcgttgtgcaggtaatacacctgcccgccgcggcgcagttcttttttgatggcgtcggagatgacgcccgggtcatattccatcacgtatgtctgcaccgggtgacggtcgtgcggcgcttcttcaatgacggacatatcgcgtataccggaaagcgccatgttcaaggtgcgcgggatcggcgttgcggaaagcgtcagaatatcggcagatttacacacgtctttcagccgttctttctgctgcacgccgaagcgctgctcctcgtcgatgatgacaaggccgaggtctttaaactgcacgtctttcgagaccagtcggtgtgtgccgacgatgaggtcaatgctgccgcgtctcagctttctcagaatttcgtcctgctgacgcggcgtgcggaagcgggagagcagctccacatccacggggaagccctccatacgctttaaaacggtctggtagtgctgccacgccaaaatcgtcgtcggcaccaagatggcgcactgcttgccggcggtgatgcacttaaacgccgcgcgcaaggcaacttccgtcttgccgaagcccacatcgccgcacagcagtctgtccatcggcgcttcacgctccatgtcgtttttaatctcgttgatgcagcgcagctggtcgtccgtttcgttgtattcaaagtgcgcctcaaaatcgtgctgccattcgttgtcttcggggaacgcaaagcccttctgcttcatgcgttgagcgtataaaacaataagctcctttgcgatgtcctttacggcggcgcgtacgcgcgctttcgatttctgccattccgtgccgccaaggcggtgcagctttacgccggagtcctcacgcggaccgatatatttcgcaactaaatcgagctgtgtcaccggcacatataaggtgtcgttttttgcgtaccgcagcttgatgtagtccttcgtgatgccctgcatgtcgattttgtggatgccctcaaaaatgccgatgccgtgcgttgcgtgcactacataatcgccgggggtcagctcggcaaggctgtaaacggccttgctgtttttgtccttttttttcgctttcggctggctgcccgcgctcatgcgcccgtgcgtgatgagcgtaaatttcgcgttcgggtattcaaagcctgcggaaagcgtacccgccacaacggctaccgtgcccggcgtgatggcggaaaggctctcaaaatagcccgcaggcagtccggcggcctttaaatctgccgccacgttcatcgcggcgcgctccgtgccggctaaaacagcacaggcatgccggttgtgcagcgcagccgtcaggtcttcggccaaaagctgcgtgctgccgccccaaacggaaagctgccgcaccgtcatgttcacaagcgcctttgtcggcgtgtcgtaagagccgcgtgcaaacgcgtccatataaacgctcgccgtgtcctccgcacgctttaaggcgtattcatacgtctcggtatacatgtcaagcccgcggcacagcacgccctccgcgagcagtccgcgtacgtcctcaccccactgccacagcgtcgtgcgcatgcgttcctttagtttcgagccttcggagaacaccagcagcgcatccgtgtcaaaataatcgaacagcgttgcgactgtctcgtaaacgaacgtgtaatatttgtccatgcacccaatgtgcaggtcgtttttcagtttatccgcctcgcgcagcagcacttcctttgcggcaggcgccgccttgccgcgcagcgtttttgcatgtgcctcgagtttttttgcaaggatactcatgctgtccggcacgacctccacggcaggggagatggtcacctccgtgatctggtcggtgcggcgctgcgtctccgcgtcaaaatacgagatggtgtcgatctcgtcgccccagaattccacacgcaccggtgcttttccgccgggggagtagaagtccacaatgccgccgcggcgcgcaaactgacccgtgccgtcaatctgatcggcgcgcacatagccacagcgcaccagcgcccgcacaatctcatccaccgaaatttcttgtccggcagagagcttcaccgtgcgctctttcagcttttttggcggcagaacatactgcaatgccgcgtcgatcgtcgtcacaatgcaggtgcactgcccggtttgcagcagcgtcagtgcttcgatgcgctggcgctcatattcatgcgagctgccctccgtgtcgcgcaggctgaaatcgcgcagggggtaaaacgcagaagtcacgcccatcgcgttcaggtcttccagcatacgcgtcgcttccgcttcgtcgcccgcaataaacagcgcttttttcgacatggcagaaagcagcgtgtgcagaatatttgctttgtggatggaagccaaacccgtcacggccaccggcgtcttgcgctgccgcacagcgttttcgatcgcgcggtattccggcacgcgcccgagcgcgtcattcaaaaaattcatacgcatagtagtgttcctttcggggagccgctcaggaattatagcggttcatcgccttgtccggcgcgccggagaggagcagctccacggcgctcgttacgttttcggaaacggtttttagcgttttcatctcgtcatttgtaaagcgggagagtacccagtccgcaaggtcccaaccttcgggcttgctgcctacaccgatcttcatgcgcgggaacaggtcgctgccgctcagataaatgatattcttcatgccgttgtgcccgcctgcactgccctttaagcggatgcgcatgcgcccaacgtcaagcgaaatgtcgtcgaatacaatcagcgtgcgctccggcggaatgtggaaaaagctcatcgcttccgttacggactgtccgctcaaattcataaaggtggagggctttaaaagtacggcgctctgtcccgcaatggtgcccttgccgtaaaggcccttgaatttcacgcggcgcacctcaatgttaaagtgctccgcgatggcgtccagcattaaaaagccggcgttgtggcgtgtcatctcatatttcgggcccgggttgccgagtcccacgatcagccagtccgcgccgcccgaagtttgatcgtttttagaaaaaagcttcatggaatgttcctttttacatcaatgtttttgtcttctttttcgcaccgcccgttttcgggaatgccgaaaggcacgcagaagccgcacagccgccgaaagggggagacccttcgccgctgcgcttttctctgcgtgtgtgtttttgcgggcatgcccgcttttcaaatatattatattatgccacccgcaaaagggttttgcaagcctattttgtccgaaaacgcgggaaaacccgccttaaaaaatcgttttgcggcgcaaaaatctgtctaaaagaaaaattctgcgaaaaatttccgaaaacagacgatttctcgaaaaaaggtatggaaattcgcaaatatatttggtataatagagtgcggcgaaacagtggataagttttttacgcctttttcgctgaaaaaaatcagttaatactcggtttaaccgtgtaaattttcaaggaggtagtttccaatgagcaaaaagtatgtctatttgttcacagaaggcaacgcgagcatgcgcgagcttctcggcggtaagggcgcaaaccttgctgagatgacgaacctcggcctgcccgttccgcagggcttcaccatttccaccgaagcctgcacccagtattacgaagacggccgccgcatcaacgatgagatccaggctgaaattatggagtacattgaaaagatggagcagatcaccggcaagaagttcggcgatcaggagaacccgcttctcgtttccgtccgttccggtgcacgcgcatccatgcctggcatgatggataccatcctcaacctcggcctcaacgaggacgttgttgaagttatggctaagaagtccggcaacccgcgctgggcttatgactgctacagaagatttatccagatgtattccgacgtcgttatggaagtcggcaagaagtacttcgagcagctcatcgacgcgatgaaggttaagaagggcgtaacgcaggacgttgagctgaccgctgacgacctgaaggagctcgcaaatcagtttaaggctgagtataaggaaaagatcggcgaggacttcccgtacgatccgaaggaacagctcatgggcgctatcaaggctgttttccgttcctgggacaacccgcgtgcaaacgtctaccgccgcgacaacgatatcccgtattcctggggtaccgctgttaacgtgcagatgatggcattcggcaacatgggcgagacctccggcaccggcgttgcgtttacccgtaacccgtccaccggcgaaaaggttctcaccggtgagttcctcatgaacgcacagggcgaagacgttgttgcaggtgtccgcaccccgcagcacattgaccagctcaaggaagtcatgccggaagtttacgagcagttcgtaggcatctgcaacacccttgaaaatcattacagagacatgcaggacatggagttcaccatcgaggacaagcacctctacatgctccagacccgtaacggcaagagaacgccggctgctgctctgaagatcgcttgcgacctcatcgacgaaggcatgatcgacgagaagcaggctgttcttatgatcgagccgagaaacctcgatgctctgctgcacccgcagttcgacgttaaggctcttaaggctgctaccccggtcgctaaggctctggctgcatctcccggtgctgcttgcggcaagattgtcttcaccgctgaagatgcaaaggtttggaacgagaagggcgaaaaggtcgtcctcgttcgccttgagacctccccggaggacatcgaaggcatgaaggctgcacagggcatcctcaccgttcgcggcggcatgacctcccacgcagctgttgttgcgcgtggcatgggcacctgctgtgtttccggttgctccgctatcaccatggatgaagagaacaagaagttcgagctcgccggtaagacctaccacgagggcgactgcatctccatcgatggctccaccggcaacatctatgacggcctcatcccgaccgttccggcttccgtcaattccggtgatttcggccgtattatgggtctcgcggacaagttccgtcagatgaaggttcgtacgaatgccgataccccgcagaacgctatcgatgcaaagcgcctcggcgcagaaggcatcggcctctgccgtaccgagcacatgttcttcgatccggacagaatcgcagctatccgcgagatgatctgcgctgacaccgtcgaaggcagaaaaactgcccttgctaagctcgagccgatgcagcagggcgactttgagaagctctacgagaccatggaaggcgagccggttaacatccgtttcctcgatccgccgctgcatgagttcgttccgaccgaagaagctgacatcgagctgctggctaagtccaccggcaagactgtcgagcaggttaaggcaatcatctccggcctccacgagttcaacccgatgatgggtcaccgtggctgccgtctggctgtcacctatccggaaatcgcagagatgcagacctccgcagttatcaaggctgcgctgaatgtctccgctaagcacccggattggaacatcgttccggaaatcatgatcccgctcgttggcgaagtcaaggagctggcatacgttaagggcgttgtcactgcaacggctgataagctcatcgcagaggcaggctcttccatgacctacaaggtcggcaccatgatcgagatcccgagagctgctctgacggctgacgagatcgcgaaggaagcagagtacttctccttcggtacgaacgaccttactcagatgaccttcggcttcagccgtgacgacgcaggcaagttcctcggcgcttactatgataagaagatctacgagaacgatccgttcgcaaagctcgaccaggtcggcgtaggcaagctcgttaagatggcttgcgagctcggtaagtccacccgcccggacatcaagcttggtatctgcggcgagcacggcggcgacccgacttccgtcgagttctgccataacgttggcctcacctacgtttcctgctctccgttccgtgtaccgatcgctcgtcttgctgcggcgcaggctgccatccgcaatccgcgccagtaaaaagttgacgcagtagcgtaggcaaaacaaccgatataaatacggtcacacagtccatttggattgtgtgaccgttatttttttgcccattttcagttaaatacaccgcaaatcaagccgctggtttcactacgaaatcagcggtttttttcattcccaaaaaattttttgaaattttttcgtttagggggtctataaatgagccttctcgctgcctacctattgagggacaaaacgaattccctcgtgaaccttgaaaaccgaatacacattcaacaggtacattcctgattgggggcgaaagccccagccggatgaaggtgcgccacgaacttcctgcccataagggttatcacggaaagcgtggataagcgtgaaaacgaaatcgtcggcaattcgcgagcttttcgaggagcttggcgtgcacgcgaaagcggaagaccttgtgtactgcggcacgcgccgcgtggtgtatgacggcgagttttgcggcaagccgtttcacgaccgtcaggtctcgaaggtgttttacctttggttcgacgcagatgaaagcgcttttaacatcgaccccgccgaggcagaccgtgttttatggatgaatttagatgcgtgcatcgacggtgtgcggcataacacgtttccgcactgcatcgaaatggacgagctcgaaattttatgcagcggtttaaaggtcgattttgcataagttttttaccgcgtaatgacctgcaccgtggtatcggcatagtcggaaagcagggaaaaatcctctttcagtccgtccgtaatgtagaccgtgccgtccgctgcaatgaaaatcgcttcaaagtcgctgctttctgcccagagagcagcggctttttctaagcccatcacaaaaagcgaggtggaaagcccgtcgcacaccgcgccgtcctcgccgatgaccgtcacggcaagcaggccgctgtctgccggacgtccggtcttcggatccataatgtgccaataggtcttgccgtcctgttcaaaataacgttcgtatccgccggatgtgacaacggctttgtcgcgcacggagaccaccatcatgggctctttgctgtgaggatttttcacggcgatttgccatgcgccgccgtccggcttgctgccgatggtctgcacgttgccgccgagattcaaaagtgcggaggtgacgcccttttcgcgcagaagttccgctgcctgttgaccggcatagccctttgcaatgctgccgaggtcgatttccatgcctgctggcaagatcacttcgccggtgacttcatcgtactgcacattcgtgtaatcgaccagcggcaaaagggaggtgagctcctcctcgctcggcaccttgtagctgccggtcgtaaagccccatgcgcgcacaatggggtaaacggaaatatccagtgtgccgtttgtgcggctgcacatcgcaagtgcctttcccatcaggtcggcggtgctgcccgtaacggtaccagagccgttttggttgatctgcgcgatctcgcttgtgtctttcgtcacagaaagctcgtcttcaagactgtttatcagcgcctccgcgtcgtcaacgagcgaagcgctgccgtatacggtaaattccatggtggtgttcatggcgtagaatgtctttttttcgacttgtggcgtgcgggaacaccccgtgcacagtgcaaaaatcagcacaaaacagccaaaaacggataaaactttctgcatagtggtctccttttgagaaaaaatcatagaatattaaaaatagatgacagatatttaaaaaatgaataccgtttccggttgacaacaaaggaaatttttggtagcatactgtgtggaggttagtgctgtctaactttatatacaccgtaagagcagagaacgtaatccttcgcgtgagggattgaaagccttttgcggcgcataaagcttggggtgcttacactgtttttttcagtgtaagttagacacatctaacccacgcgcagcattataccacggaaaagcgcgcctttcaaccattttaagagattttgttgaaagctgtccgtggaaatatccgaagcggcggagaaaccgcaaaaaatgaaggaggcagcatgagaaacatttacaaaaaagcagcgtctttgcttttggtgacaatgatcctcttatccatggtcgtgaccggcgcagtggcagaggcagcagcaccgacagaagtgaaaagctgcgaaaaaagcggattttatacaaccgttttgaattttgaattcagcgataccacatggctggatgcagtgaacggcgttaccgtaaacggtacagcgttcacaggccagacgatcagcagcttttcaaacgataccggcatttggtgtgtcggtaatgcaacgggtgcatacggcagctataaagccttacagcttgccattgagaacgacgcttcgttcccgctgaccgttgaagttacggctgcaggctacaacaagctgacgatggaagtcgcaaaggcaacggtcagctataacgatgtctacaccgcgaccgtaaaaatctcggagaccgagccgaccactcccccaacggagccgaccaaggagccgacgccggtagaggatacggatccgccgacgagctttacggcaagttctaattttggaagcgatttcaatttaacattcagcggtgcgtatgattggttgaattcgatcaccgccgttcaagtaaacggcactgcatgggaaaaggcatcgtcttcctttggtgtgagcagaaatagcaattattatgtcagacccggtaacgaatacgaagacggctatctttacatcggtgaaggctttgatacaaatcccgcgacctgcattatcaccgcaaagggatataagccgttaacgcttacgttggataagtcaaaccacaaggtcaccatcggtgcagtggaagaaaccacctacaaggcttacgcagcgaaggccgaaaacggaagcgtctctttgagcgcttccgagggcatcaaaaagggcgagacagttacagttaccgtcaccccggatgtgggctatgagcttgatacactaaccgtaaagacggaaagcaaagaagtggagaccaaaaaagtttccgaaacttcctacaccttcgcgatgccggctgcaaatgtaaccgttacggtaaagttcaaggcatccgcactgaaagttgtagatatcgacaaggtcacgcttacggaagatactttcggaaacgattggcatatcaacttctccgagccgagcgactatgtggaaaacgttaccggttttaaggtgaatggcatttcttgggaagaaaagtcgtataacatttcctccggcggcgcatacagaaagtatgcggatgataactacatccagattgcgcaaaagagctactcggcttccgaaaatgaagtacctgtcagaagcggcgatgtcatcaccatttccgcaaaaggctatgaagacctgaacctcaagttcgttgtagatacaagcggtaaggcttctctcattgcagacgacggcgagggcgatccatatgaattgcatgtaaagattgagggctcgtttgaagccgctatcgtcggccagaaagattatgacggcgtttccggcgcaagcacgggcggttccacatcgaataacaacagcaacgttaccgtttacggtgcactggttgaaaaagacaaagagccgaccgatgacgattggcaaaagctcgataataactccgaaatcgatctcaacggcagcaagtgcaaggtcagcatcgtgccggatgtcgaaagcggcaccccggaagacgcagacagtggtatgagcggcgtttacatgcccatcagcagtgaccttacgctaagcggcacaccgaaggacgcaggtaaatacctcgtctcggtttccatcgaagacaagcagggtagaaaagcgaccagcaacacgctgccctttatgatctacaccggcgaagaaacgctcgccgagcagatcaagatcgaaaacctcaagcagtatgcaaacggcctgtatgcttgggatatcatggagccgtgggccatcaagaacttcggcagcaatgtggacggtgaagaagaaagcgtccgtgtaccggctgacctcgaagtctggttcggctcgcatgagagcggcacatacggctacctcggctatgaccttgcttgggacgaggtagaagcgggcaacattccgcagacactgtacattccggccggctgcaacttgacgctcaccaacatggaaattctcagcagcgtgcgcatcgtcgtcgaagacggcggcaaactgacactggacgattccgttgtgcagggcatcatcgacgtgcagggcggcggtacgttctccatgaattacagtgcttattgcggcgaattcaagacgggcgcttccgtttgcggccagatccgccttgcagacggcgcaattttggaaaacgcagcgatctattcccatgctaactaccttgcaaacggcgatttaacagaccgcactacgtccgagccggtcgttgtcacaaacggcaatgtggccgtcaaggggcaggtcttcattgaaggcgatgatgccggcaatgagattggccagaccgctctgcaggtcaacggcaccctgacgcttgcagacggcgcaacgctcgttgcatacggcggcggtggtatgacctattttgcaggcggcactgcaatcgatttgaacggtactatcaccggcaatggtaagcttgttgccatcggcggtgcaccgctcttcggtgacggtggcacggcaatttccggcagcggcaccatctccacaagcgaaaccttcctccagggcggcacggcatttacaagccgggatgcaaagcccggcaaggcgctgaacggcgacattacgctcacaagccagagtcgccatgtaaaagacggcacactggaagaaaccggtacggacgatccgctcaaggcgctctactggaataccggcattgagcttatcccgccgctcgatatgtttaccaccgagcagcatacggatgccgtaacggatacaactgtgtggaagttcgacgagaacacccactggaacccgtgcgacgacgtgacctgcagcgtacatgtaaacgaagcggcacacaccttcgtttgggtcaatgacgaagcggaaagcgacatcagcactcggagcatagaagccagaacaaagcacgaggagtgcaccgtttgcggctatacgcgcaatgaaaacacacccatcacgcccgatccggtcgtgactccggagccgtctgccaaacctacggcggaaccgaccacggcacctacgacagagccatcggttaccccggcacccacaacggaacccacagcaacaccggcaccgaccacagagccgaccacaacgcctgcgcctacggcagcgcctacggcagcgccgagcgcagcggctaccgttaccccggttccaaacaataacaacggatcaaataccccgaaaaccggcagcgattacattgccgtcatcttcagtatttccctcctcaccgtttccggcgcagccattgccgcacttgtgtttttgagtaaaaagcgaggtaagcacgtcgcaaagtaaactcgttttttacgaaacagaaaatattttctccctgataaacacgccccggtggacaatttccagtccgcatgggcgtgttgctcattcttttacaaaagcaagaccgaagcagcacctgacgctgctgcgcctgtacttgatgcggtccagtactataaggatcacaaagatctcggagcacgtggatgtgcagaaaatctcggcatcggatacgaagccattcgtcacagtagaacgaaaaacggtgccgggagtttgtgtcgggaattggtttaccattgaccagcgccgctttgcacttgttcactttttccttggcctcccgataagtcttgccgtagcagaagccatactcaattttttcggaagctcgtatcctttgatatagcgcgcttcccatctgccgttcttgcgtttgaaaatattttcaccttttgccatcttaagaacctcctgattttaaaaaaattgtgttaacttacattctaccaacagcaccaagctggttcagactgcgcatttgactgcgataaaccgtcagccaaacgtgtcagcagcaggaatcgggcacataatttcagtttcacacccgcgccccgatgcgttctgaaatgaccccaaaaagtctggaaagggagacaccggagaaattcggtgtttttcgcattttgtgggaaaattgtgtaaagttttctttacttctctgagttaaagtagtatactaatacgtatatattcgaaaagtgcggcagtttggctttttgggtatagcaggtattttacggaggagtgtataggactatggagaaaaaaacaagcaatttttccgggcagctcggctttgtgctggcggcggccggcagcgcggtgggcgtgggcaatttgtggcgctttccgtaccttgcggcaaaggacggcggcggactgttcctcatcatttatctggtgttggtgctgacgttcggctttacgctgctgacttccgacattgcgattggcagaaagacgcagaaaagtgccatcggcgcatatgaggagatgcacccgaagtggaagttccttggtgtgctgacgtttttggttccggtgctcatcatgacgtattatgcggtcatcggcggctggatcacgaagtacgcgtgcgtgtatctgacggggcaggcttcgagcgcggcgcaggacgactactttacgtcgtttatcacgtcgccggtgtcgcctgtggtgttcggcctgctgtttatggcggtaacagcgttcattgtgtataagggcgttgagggcggcattgagaaggtatcgaaattcatgatgccggtgctgctggttcttgttgttattattgcgatttactcgctgacgttaaagcacgaggacgcggacggcaacgtgcgcacgggtttacagggcttcctctactacatcaccccgcactttgaggggctgaccgtggagcgctttttgcagattttgctcgatgcaatgagccagctgttcttctcgctgagcgtttcgatgggcattatgatcacctacggctcgtatgtgaagccggaggttgacctcaacaaatccgtttcgcaggtcgagtttttcgacaccggcgtggcgctgcttgcaggcgtgatgatcattccggcggtattcgtgttctccggcacggacggcatgggcgtaggcccgagcctgatgtttgtgtctttgcctaaggtgtttgacgcgatgggcccggcgggcacggtggtcggtgtgctgttcttcatctccgcaatttttgcgacgctgacttcctgcatttcggttttggagtctatcgttgcgaactgtatggagatcttccacacggacagaaagaagacgacgcttgtgctggcgctgatttacctcgcagcttccgcggtgatcgcgctcgggtatagcgtgttctacttcaacgtgacgctgccgaacggctcgagcgcgcagcttctggacattatggactatgtcagcaacagcgttatgatgccgttgatcgcgttgctttccaccattttgatcggctgggtgaaatcgccgaaatatgtggcggacgagatggagcgcggagggtataagttccgccgcaagcgtatgtattacgtgatgatccgctacgtagcgcctgtgatgatgctggtgctgttcttacagtctacgggcttgctttcgatgatatttaagtaaatttattggtgaatttccgcgtgagcggtttaaggcagtgccgtgcggagttttgcggcgctgctttgctattttaaaaatgaaaggtgatacttatgaaatttcccgaaatgctgaccggtgtgcagcacatcggcgtgccgacgaacgatttggaaaagaccgttgcgttttacgagaccatcggttttcagccggttttagagaccgtaaacgaggcggcgaacgagcgcgtgacgtttttgcagctcaaaaatttagtcattgagacgtatgagaaccacgcggcggtggggaagcccggcgccatcgaccacattgcgctcgacacgacagatgttgaagcggcgttcgcagcggcgaaggaagcggggcttacgatgctcgacgacgagattcacgggctgccgttttgggcgaacggcgtgaagtttttcaccgtggaaggtccgaacggtgaaaaagtggagttctgtcagaaattgtaagcgataattagaatatagaatttcggcggctgaattgcgttttcggatgcagttcggccgccttttttgctgcccgaagagggttgcttttaagcggtattccctttgaaatataaaaacgccccatttcttaaacagtataccatactgtccaacaaatggggtgcagttcatttgaggcgtgcttcctttttgatcattcacttttcggcggcgaggatcattttttcgagctctttggcggcgacgctcaggggttggcctttccgtttgatgacgacgacgtttctttccggtattttctcttccaaatcgatgcgacagacatttgaccatttttccaagaattcttccggcacgaacccgatgccgaggtcggcttcgaccatgggcaaaatttggtcggcagtgaacgcttcgatatccgggtggtacggcaaaccgtgcgcggcgaagaacccggaatagaactcgaacgatttggtatcggcgccgagcgagatgagcgggaattctaagagctcctcaagctttacttggcggtttgtgagcgttttgaaaaacggtgaacatacggcatactcgtggatgggtcggacaggggtttcggcgagcgaggcggacggtgcggtgggggtggtgacgacggcaatatcggctgtgccctcttttaacgcggcgatagcctgcggcgtggagtggttgctgatgcggatatggatgccggggtggagaaggcggaattttttgagcacgggcagcagcaggcagcgcagcgcgacctcgcttgcggcgacgtacacggtgccggtttgcagcgtgcggctctcggtaatctccgcttcgccggcttcgatatgctcgaacgcgatgcgcacgtgggcgtacaagcgctcgccctccggcgtcaatttcatgccgcggtttgtgcgcagaaacagtgggcacccgagttcggcttccaggtttttgatggcgcgcgtcatgttcggctggttatttaaaagctgctttgcagcctgcgagaggttaccgtattttgcaacgtaataaaaaattcgatagtaatcataactgatgtacatgttggccctgttccccttgctatatcataacgatattttagatatatggattatagattttacacatgaatataagagtattataatggtaatgctgtgggaagtcaagatgatttcgcgcagattttgtgctgaaaagcgtagataaaaagcggcgtttcaaggttttgtgcgccaaacgaagaaggtataaaatggaagcggtagtttttgaaatcattatgggtattttctttgacgcaggtatgctggcaatggtggtgcatgcagcgcagcacatcggcgaggataccggtcgcgttcgctttacggcggctgtatttgcgattggctttttccttgggatgattgcaaaatgcgttgtgggcggcagctacattgcgctcgccctgtatgcgctaggctttgtgctctcgtacacggcggtcgttttcactgtgccggaaaaggagcacgcctatgaaggtcgctgagccgtttcatctgcacggacagatgtccgacagcttccgcgcggcagtgttcatcattctctccggcggatttcaggacgcatatacctacttttgtcgcggcgaggtttttgccaacgcgcagacgggcaacattgtttttttgagcacggcgctgttccagaaggactggccgaacgtggtgaagtaccttatcccggtggtatcgtttttgatcggtacagcggccgcggagctgatacacattcgttttaagacgtatgagaaaatccactggcggcagatcattttgttctgcgagatcgtgtttttgcttgtcgtcggctttttgccggcatactttgaaccgcttgcgaacgcgatggtctcgtttgtatgtgccatgcaggtgcagacgttccacaaggtgcgcggccacgcgtatgcgagcacgatgtgcatcggcaacatgcgctccggcaccgaggcactgtgcgcgtatttcagaacgcgggataaagagattttgcagaaatcgctgacgtatttcggtgttatttttgtgttcggcatcggcgccggccttggcagcctgatgagcggcctgcttgggacaaaagccatttggtgctgctgtgtgtctttgctcgttagttttgtaatgatgtttgtccccgaaaaaaacggataacccatcttctgcgttttccccttgcagagaagttataaccccaccgtgctatacgggccctgaaagctcccgtgtggtgcggtgggatttttataagtaaaaatcttgttaggtcgtgtatgatttggtaggatgcagtgaatcgcggaaacggttcggggatttgtcaagcggtggattggaatcgagcatagcaaaagagctgtctctttagagacagctcttttttggtggaaacgcgcgggctcgaaccgcggacctcctgcgtgtgaagcaggcgtgctatatagtgtagacaaggagtgaccgaaaggctgctctttttcatatcttaatttcatatttctgacggaaaccggcaatgttgccggttttttatatttccccggtttcgggagttttaggaggctcgttatgaaacaaatcaagaaaatcgcaattacaaacgaaaagggcggcgtcggcaaaacgatgacggccgtcaacctctccgcatgcctggcacagcgcggctaccgtgtactgctgatcgatgcagacccgcaaggctatgctacgctcaattatgatgtggacgtatctccgtccttacttgaggtgctgcgtgggcaggtagcttgtacgaaagccgtacaaacaacgcgctttggcgtggatgtgctgccgtctgaccgaacgctgagtgtgattgaagaagatttgatccgtcagaaaatgaatggtgcgccttatctgaacacgttggaaaaggcactggaagatcttccagattatgatttcgtcatcatcgactgccctccgcagggtggcaggctgatggatattgtacactattatgcggatgcgatcatcatgccgatgtttgccgaagactacggtatccatgctctgacgctcaaagctgaggctatcgcagatattcgccgcacgataaatccaaatttgaaaattcttggcgggcttatcacgatggatgagcggcgcggtttgcgcagtgtattccgcgaagtccttttgggacaggatttgctgccgatgttcagcacgacgatccgtcgcaatgtggcgctgatccgtgcggtaaatgcacgtgagccgatctgcgtttttgataagcggagcaacggaaatatagattatcaggctctggcagacgagtttttgagaaaggttggtgcgtaagcatgaaaaagctgaatttaggtaatatcaacgccgggttaaatagtttgaaagcagcaacagataacgccgcacagaacggcagatttgagctgatcgatacggcactgatcgattttgcggcgaagaactcttacgcagccgatgacaatgaggaatcctacaaagagcttgcggcgaatatcgatgaagtcggtttgctcacaccgttgggcgtgatcgtaaacggaaaccgttacacactgttctccggtgaacgtcgttttagggcaatcactacgtatctgcattggacgaaagtgccgtgctatgtgtttgagacaaaatctgtacgaaaggcgcaactgatgctgcatcaagccaatgcaagccgcgaatacacaccgcagcgcaaattgcagctttacgaagaatatcgagagctgcttgaagaaatgaaagaagccggtgagataaaaggcggtatgcaggagcatcttgcaaagctgatgggcgtttctgaacgctctgtgcgctattataagcaaatgtctgaacagcttacaacggaagaaaaagacgacgtggcagagggacgcttagacattaaagaagcccgtgaacgtgctgtggagcgcggacgggaaaccggcaatattgccggttctggcgagaaagaagaaaagagtgaaaagtcggaaaagccgaagcaggacaagcttgaacaggcaattttaaaagttctcaagcttgcggataaggaagaccctgaaaaagtcacggctttactgaatcggtatttgagagggtacatgggatgaaattcagaaagatcaatgtacacccgctgcgcggtgctgacccaaggctccgcgcagtcgcaaatatcttgacggcagacggatatgcgataaacggcatccgcgtctatgaggataaaggcaaaatgtatgtgcgctttccgattgtccattcagaagcacgtgcgtggaaagccgggcgtgcagcaaattttgcatttacgccctgtacacatgctgctcgcagagaaattgaaggagcaatattagaagcgtacaaaatgaaaaccggcaatgttgccggttttgaacaaaggagcgtgcagtaatgatgttaattagaacatcaacagaatcatggaacgcagaatataccgtgcaaggtaacagagacgcacaaattgtgcgtattaaatctcgttcaagtattacagttgttattgcaaaaatcatggaaaacctacccttagtcggcaaaacggttacgtattacatatccgtgccgaactacggcatagccctcccggaaatcgagagcttgaatgagtcagcatggatcgttgataaacttctcgtgcgaaatatgccgcgtgcggatgcagttacgattgctcaggtgctgagagatgttttgaaaaacgaggtgaaacaaaatggcaacgaaatacagagtttataatgagttatcagaggatgagaaggcccaaatcgccactgagaaacagtggcataagcgaggatattgtcccgtagagaacgagggcgaactcatgtactgcaatcgctcttggtctaaggcggtatattttcgagctgaccaagtgcggagaatgtccgaaacggaactcgcattgatccgcgccgagagaagtgccaaagacgcggcaaagcgtgcaaaggaaagggcggttgcattggctgaacaagaagcacagcgtaaacgggaaaatctaaatatctatcggcaaaaatgcgctgctatttgtgcggctgtgtctaagcgtccgacaaacctcaaactcgtttttgatttggaaacgaccggcttgaattttgctgaggatgaaatccttgaagctgcgattacgacggtagacggtgaggtgctttttgaatctcgatttaagcctgcatataccaaagagtggtcgggtgcgcagcgcgtgaatggtatttcaccagaggacgttgaggatgcgccgggaatcatcgataaaatcggcgaaatggcggcgctgctgcaaaacgccgaaacggttattgcctacaacggcaagcagtttgatattccatttctcgagcgttacggtattcgactccgaccagatgccgtgattgatgatccgatgctttacggtgcggtcgtatacggagaactgcgtggtgaaggtgaggacgtgaactataaatggaaaaagcttgcggtattggcggactatctcgggtacaaaggtgcgaattggcacagcgcggctgccgactgcattgccacggcttatgtgtggcgacagttgcaggagtcggacatgatcgaaaagtacaatgagaatttggcaaagcttaatgaggtgtcggaagaaaccgacacctcattttagacctattgcaattttgcagagcacaaaatataatgagatacacaagagaatcagaaacatgaaaaggagcggtgcagaatgaaggcaatgtacggagttgtgttgttgtgcacagaaggtatggcgatttgcgaggacgactgggaagatctctggtgcgccgagatgccggaagagtttgtgacagaaggagacggtattgaaatcgacggattgacaccattagaagatcttccgatagagcagcagacacggattaaaaatgagctggacgcactaccagaagaatatctggatgttctgcgtaattacggaggaaaagaaaaatttaacttgtcttgaaatacaggaaccggcaatattgccggttttcttgcttttcaacttaataggaattataatgaaaccaatgaggagtgaacgactatgaagaaagagatcacagcaatattgatggcggcggcgcttacggtatcgcttgcggcgtgtgcgggcagcaataccgaaagcgccgtaacggaaagctccgcatccagtgcggtaagcagcacggtatcggaaaagaacgatgagagcagcgcatcggcggaaagcagcaaaccgtcagcaagctcaagcaccgcgagtgcaaagcctacggcgacgccggatgcaaaaacggaaagcagtagtaagaccgagagctcgaaagaaagcagctcatccgtctcatctaaaacagagagcagcacgacgagcaatccgtcatcctcgagctcttccagcagtacggcatcaaagccgagtgcaactgcgaagccttctgcaacgacgaagcccagctccggaaacaccacgagtaaaccatcttccggcagcaacgcgactgcaaagccttctgctacagcaaccgtaaaaccgacaactgcaccgacggcaaaacccacagcgacgccgactgccaagcctacctctaagccgtctgcaaccgcgacgccaaagcctacggcaacggctaaaccgacggctgcacctaccgcgaaacccacaacagctccgacggccaagcctacggcagttcctacatccaagccgactgctgcgccgacggcaactccgaagcccaaagaaaaagtttgggttgtagatgttccggcaaaagaagaggttggtcattgggaagaagatgggtattggtggagtgatgtagtgtatagatgtaatgagtgtaaagagacttttccgacaacagatgccttctatgaacatgtaatccctcttgtcgaagcaggaaagcattcaatgggaagttatacagaagttccgggagaatcttattgggtaaaaacaggtcagcattgggttgttgatgagcctgcgcaagaagaacaaggtcactgggaatacaaataaaaaattgaatattgcagcatgaagcatccgttttatcgggtgcttttttactgcaaaaattcaagccgtactttttgagtgcggcttttttcatataaaaatctaacgaaaggaatggcaaaaaatgaagaaagcaaaacggattttggccggagcgcttgcggcgttgatccttacgatgtcactgccgttaagtgctctggcggatgaagccgatgtgcctgcggaaagcccgagctttgaagtttcgtttgatgtagataccgggcaggaagaaatttcggaagatcttccgaccgaggttgaagcgacaccggagcctaccccggaatctaccacagagccaacgcaggagccaacacctacgccggaaagcaccgctacaccgaccccgacggcagaacctaccgcagcgcccacggctgcacccgaagttaccgcaacgccgacaagcacaccggagccgagtgtcgccgcatctcctacgcccagtgctgcgccgagtgcgtcacctgctgcaaagccgacgcctacgccgtcaccgcagccggttacaaacccaataaagcttgagcacgaggtcttaacggactatgagaccggcggactttatctgttcccagttcccgacggcgacgaaattacgcaggaatacagtgagcaacacaaagcttgggatatagctgctgttactggttctgctgtggtggcagccgaagaaggcactgtaacttatgtgcagatttgggacggatcgtatgacaccaccggcatgatgagctacgggcacatgattcggattgaacatccagatggaaataccacactgtatgcacatctatctgaaattaacgtgcagcaaggcgaaaaagtcgtgcgtgggcagcgcatcgggcgcgtcggcagcactggcaattctactggcccacatttgcactttgaggtcatgagtgagactggtaaaaaggaaaaccctgaaccggtattagaatacggagtatccacgctactggatgattacacatggagttgggtcaatcagtatcttaatcgacctaatgggacgaaaacaatatctgattacggagtaacaagagacaaagttgtagctgaacttacttcgcatcaaagtgataactactatttgggtactacatatgtaggcggggatagccagtctcctaaaggagatacaagctacaatggcagcgtgggtatgaactgtgctggctttgtcagctatgtgctttgtaaattggggttaaatgcgggtacgtctgacttgaataatcatactgcgttgcctgcgaactcggttcaggggcttatgactaaggcggtcggtggtcgttctgcagattggtacagctcgtataaaagccgaaaccttttggcaggtgcatcaaactattgcttctggattgcaaacggtgatcttaagtcatatgcattccagtcaaagagcgatatgctttcgtctggtgtgcttgaaaaaggtgacattattttaatgttgccgacaacagcatcggccagtgaccgagatacgcatattggctttttctggggaaactcctccagcgaagataatatgtggcatagttttggttccaataaccatatttcgaccataacacctaagaccagcccttcttattacgtggttattaagtacgcaccgtctgaatatacactgacgctcaataagacaagctctaatccctcgttgacaaacaataacagcaattacagcttgtctggtgcagtgtacgaagtttacggtaacaaaaccacttatacaacctcaacagtcacgtattacaccgtaaatgcaagtggtggccttaatttgcgtagctctgccaatacaagcagttctgtgttgataaccatgaccaatggagcaagcgtaaagtatcttagcacatcaggatcgtggtatagggttgaatatacccattcaaacggtacgacctatacaggatatgcttcatcgacatatcttacgaataaaactacgcaaactatttatactccaacagtaacatcgaatgcattacttggtacgcttacaactaactcgtcaggatcggcgagtcttgttgtgcctgcgggaacagtgagcgtaaaggagaagaccgcaccgaaaggattctccgttgataatgaaactcatacagtaacgatggacggtaataagacactcaatgtctccgatacaccgattatctatgagtacaatattaacctcacgaagacgagtgccaatgtctctatcacaaacggcgacagtggatacagcctcgccggagccgtgtataaaatctataacagttcaggtacggaagttgcatccatcaccaccgattcatcgggcaagggcagctcgagcgcgaagctcaaaaacggcacatataccgccgtggaatccaaagcgcctccggggtatgccttggacacgacaaggcataccgttaggatcaacaatgctgacgcaactctgaatgtcagcgatgtgcctttgattaagacggtgacactaaccaaaacgagcgctaacacgtcgatcacggcaggcaacagcaattatagtctcgccggagctgtgtacgatgtgtatgaaggtaattctgctacgggtacgccggttgcatcattcacaactaacacatcgggcgttgcgacgttaagtcgcaaattatatccaaatcgaacatatacaattttggaacgaactccgcctcccggatatgtaaaagatacgacgccacatctattctatcttacttacaactcggcaacaatggatgttgtggatgacccacaatatgtcaagatcatggtaaaaaagaaagattctggaactaaaacaaatgtagctgctggtaacgcatcacttgcgggtgctgtgtacgcaattacgtataaagaaaacggtgtagataaaaccgttcaaaaaacgaccaatagttcaggaattctctattttaccaacgtgcctttgggcgagataaaaattcaggaaatctcagctccggtcggctacaagcttgattcaacggtgcatacgtacaatgttacgtcggacaaagtaacttctgccgtttacgaaatggaacccgaagattttaccgaagacgtattcaaaggcaaaatttcgctcacaaagcagattgaaatgcttggcgcggatgcacagcttgagcaaggcactgaatatcaggtgtatctcaaatctgccggtagctatgccaacgcaaaagacacagaacgagattatcttgtgaccggggcggacggcaaggcgaccaccaaagacctgccctacggcacgtatacgctgcatcaggttaagggtgtgccggggcgcgaatttaaagacttggatgttgacgtccacgaaaacggtaaaacgtatgaggtgacgctcacaaacgagctcaagtatgcgccgctcaaaatcgtgaagacctccgaagacggcaatgttgccggttttacattcaaggtcacacggcttgcggatgggtatagtaaaacatataccaccaatgcggccggtgagatcattacagatcagatgcctgtatacgtcgatgcagatgcaacgcagctgtatgagtacaaggtcgaagaaatcaacgtgccggataaatatcgcacgccggatgcacagacgataacacttacctatggacagacggcagaggttcgcttttacaaccaaattgcacgcggcacgcttgaaatccttaaagtagaccacgacggtgtgacgccgcttgaaggcgcgaagtttgagattacagacgataacggtaatgtaattgcaaccaaaacttccgggccggacggaaaaatcaaggtagactcgatcctttacggacaataccactggtcagaggtggaagcgccgaagggttatgaacttgatgataccgtgcatgactttgcaatcgagcacgatgagcagatcgtagaagttacgcaggaaaataccccgagcgtgggctctattacagctaaaaaggttgatgccgatggcaatgctatgccgggcgtagagtttacgcttgagtacagcaccgacgacggcgcgacatggaccccggtagaagccagagcagaagacagcaagccttctatcggcggttgcacaagtgcagtcgttgacggcgcacttgtgaccgatgaaaacggcgtcactacctttaatgggcttcaggtcgataaccagaccgtgacgattctttatcgcttaaccgaaaccggcacgaagtccggcaacacattgctcgcagcgcctttgtttatcggcagcttgccgcaggtgctcgatgacggtacagaaaccgttgatgtggttgttacagcggtcaacaatcaaagttttacattgccgtcttcaggcggtaacggcatgatgggcgtgccggtaggcattgctcttgtactgatttccgcgtcctgcattttaatgctgacgcgtaaaaagaggttttaaggggattctacaacccttggaataataaacgaagaaaggaaatgagtagaaatggcaaaatccaagttaatctctcgcattggtgctttggctttagcagcagctctggcctgcacctctctgatctcggcctcggcggctactatcgataaagctaccatcgatatggacgcaaaggcacagctgtccatttataagtatgactttaccaacgccaaaaaagatggcgtgtggaacgaacgcagctacgtttctaccggccagtatgacgcaaaagtaaatgaagtgcttggtggcacaacgcgtaccggtgcgaacagcgcatcttctgcacttggtaatggacaggcaagcaacggctatgcaattaaaggtgtcgagtatacttacctcaaaattgcggacatcacgcagttcacggagtccgaaaaagacggcggtcgtaccgacagccacattgaggtgctgtatgcaatcgataaagtcaaaggcgcagatatgctcgctgctatcggccttgcagacggcaaaaacagctatgaaaacgcaaatgcacttgatgcaaacaactggtattaccagtccgacgtacttagtgcagcacttaaagctgctcttgaagccaattccacgactgttaagaattcgctcgaagcctacgtaaaaaacaacggcggtacggcaatgaccgaaacgaacgaggacggctacagcaacgtaaccggcctccccgtaggtctctatctgctggttgaaacccgcacaccggaaatggtgacaggtacaacaaatccgtgctttgtcagtctcccgatgaccactgttgacggtggtatggcagacggttccggcaaccagattacgaccggcggtcatgactggaactacaatgttgttctttacccaaaaaatgagaccggcattgtcacactggaaaaaaccgtgcgtgaagctgtaaaagacaccggtaaaaacaacgcgaccgatgttatcaccgacggctttacacacaacgcaacggcatccgcaggcgacaccatagaatatcagatcatctccacactgccgacgatcacgtctgcggccaccaatatcagcgcgtatacgttccaagatgttctggcccgcggcctctcttatgtaggcggcacgaacagcgttacactcgaattctttaccgatgcaaattgcaccaacaaagttaccacgtggaagcagtccgacggcaaattcaaagttacgcgcgaagaaaacaacgacggtacgcatacgatgacgatctccatgaccgatgatggccttgccgagatcaacacagccaatacggcttacgataacgataacggcaagctctatgcaggttacagcaattacacacttcgtatccgttacgacgcaaaactcaattctgatgagtctctggtttacggtgacaacggaaacaaaaacgaagtcgtcctcacatggaagcgtaccaatggcacctactacgacacccttatcgacgacgcgcatatttacacgtatgcgacgaacatcacgaaaacctttagcgacggtaaagaagaacagacgatgttcgataacgtcctctttaaagcgcagaatgcgtccgatggctactatgtaattgcacagcttaatgaggacgagggcatctggtatgttaccggacacacggacaaagaagcctctgcaacagcaatgcaccccgtcgaatggaatggcaaaaagggccagatcatccttaaaggcgttgaggacgaccagtacatctggacagagctcgagactgcaaacggctacacgctgctcaaaaataacatcgacgtaacgatcaagtccgtggatgatgcaaaccgcccgtgcgacatttacggcaaagatacactcggtgttatccagaacgacccgcgctacaacttcccgaacaatgaagattataagctcgccaacatcccgcagaagcagttggctcataactatcagactgcatctgcaacggttgacggtaacgacgtcacgatgctcgacgatgagatggatactgattctaccaacgcaattgcgccattgacagttgtgaacacaagagttttcattactccgatgaccggtgatagaggtacgcaggcgcttgctatcggcggcgttctcgtcttctgcctcggcacttctgcatttattttcttcttggttttcaagagaagaaaagagcaggaagataagtaagagtacaccaaaattttgaataaggaaaaattgaagaaggtgaaaacatgccccaaaagcgaacgtacaaaggtgcgcaggtcatagccatcatcatcgcgattttactgctgtgcgtcgcgggattttgcgcgtatctgctcatccataaccaacagcaaaaagctgagcaaaaggagatgtttgcaaccatagccgaaaaagtagacgcagcggaaaacgaattgggagacttagagcaaattagcacggtggaagataaacgggtggcgcagctgcttgaagtttatggggaactgcacaactacaattccgattttgtaggctggatacgcgtgccgggcacagagatcaattacccggtgatgcagtcgccggatagccctaattattatttgcgtcgaaattttgagaaagcgtacagcaacctcggcacgccgtatttacaggaaaactgcgatatacgcacgtgcgataacttgataatttacggccaccacatgcttgatggcgggatgttcagcgatcttgagctctataaaaagagaaaattctttcagcagcacaaatacgtgcgttttgacacattagacgagctggggctatatgaggtcatggcggtcgtcatcacaacggcctatcaagcagacagttttcaatactacaactacatcgagaacaacgaattaacctttaatacatacgtacaggaatgtaagcagcgtgctctatatgatacgggcattgatgccgaatatggagataaattagttactctatcgacatgcgaatacagcaacgataacggcaggctgatcgtcgtcgcaaaaaagattggagggatcaaaaaatgagcaaacgcaaaaacaccatcatcattatctgttttatccttgtgatcctgcttggcgcaggtgcagctacgtacccgttaattgcatcgattaacaacgagcgcacgcaatcgctcgtacagacggaatacgaagaaaagcttcagcagctcgacacttcggaaattgatgaagcccttaaaaaggcacatgaatataacaaaacgatttctaccgtacagatcgaagacatcgataagataaaggaaaatcttcctgattacgaagatcttctgaaccttgccaataacggcatcatgggctacatagagataccgaccattaacatagacctgcctatatatcacggcacgaccggtgcagcaatggaaaaaggtgcgggtcacatggaaggcacgtcgctgccggtaggcggcgtcggcacacatgccgtgatctccgcacactccggcatggcgggagcaaagctttttaccgacctcgataagcttaagcttggagatgtatttttcgtgaccgtctgcaacgaaaagcttgcctatgaagtggacaacatcgcagtggtggagcccacagacatagacctcattcgtattgatacacagcaagattatgtcacattgctcacctgcacaccatatggcgtgaatacgcacagattgcttgtgcgcggccacagagtggaaatggccgaagaagccatagcggaggttgaagaaaaggtagtgccggagggcagcacgtggatagagaaatatgcggaagggcttgtgatcggcttcatagcttcctttgcggcgatgctgttgctgctgatagttcttctgatccgccgcagacaaaaaaagaaaaccggtaacattgccggttctgaaaggaaatgatagaatgccaaacgcttatatagagctgattgatagcctgattttacagcggcaagcacttaaaatatcgcagcgcgaattagcttctgccgccggagtttcgtggacggaggttgcgctcatggagcagaaaaagcacatggtgcagctccgggcactgctgcggatagcagccgcgctaaactgcaaactggtggccgtgagtgtcgaataaaaatcttgccatataatgccaaatttggtagaataaaaacgaactgcaatatgcggttcgggtgctgccataacggtggacggttcagccctcagatacacttcggtgtaccgtgtgagggaacatttcttgaatatgaaaatatccctcaatccaacacggagagagggatgacgcttatgaagctcgagctgacctttagtgatttgtgccagttggcattggtcatcattgcgctgatcgaactgtttcgtgatcgtaaacataaaaagaagtgagccgccctcgcctaaggattcggctcaacttctttgagtaatactgagggctaaccgttcatcggcagcactctttctatttctaattatagacgcttttgaagttttgtcaagcgcgaaaagcggcaatgttgccggttttgcacttgatttattttttctcatttattataatcaaactaaacagggagtgaagactatgaaaagaaaaatcacagctattttaatgacagcagcattgatgcttaccatggcggcgtgtgcgggcaacagtacagcggataccggcgttgaaagctctgcatccagtgcagtgagcagcaagccggtttcgaacacaagctccacggccgcaagcagcgccaagccgagtgcatcggcgaagcctacggctactccctctgccggtgctgcggcaacggtcaagcctaccgcaacgccgaagccagagagtaaaaccgaaagcagcacggcaggtaaagcgagcgcgacggctacaccgaaaccggcagcaaccgcaaaaccgagcagctccaatacttccaacagcaagccttccggcagtgcggccagacctacgcccgcaccgactgcgaagccgacagctgcacccaccgcagctcccacagccaagcctacggcagctcctaccgcagcgccaacggcggttcccactgcgacgccgaagcccaaagaaaaggtttggatcgtggacgtacctgcccaagaagaagtcgggcattgggaagataactacatttgggaatgcgattgggtttatcaatgcaatggatgtgggcagatatttgacactgaaaacggagcggcagatcacaatcttacagaatgctttgatggaaattacacctgcggcagttacaccatgataagcggagaaccgtataaacactatacaggagagaaatattgggttgtagatacacccgcccaagaagaagtcggacactgggaatatagatagaagaaactaaagtgaatattgcagattgaaagcacttgattctataattgagtgcttttttaatgctcaaattcaagccgtatccctgcgatgcggcttttttcatatagcaaaatctttgaaaggaagcaaaaacatgaaaaagaaactcaaaaagtcacttgcgtgtctgcttgcaacgctgttgattttcagcaccgtgccgatgagcgctcttgccgatgaagcagctgcaccggttacagtcgaaacagtcgttgaagaagctgcaccggacacggagccggatgcagaaccgaccgcgacaccggaggcaagcgcaaagccctctgccgaaccgacagcagaaccctcaccggaagcaacagaggaaccgactgaatcggaggtcagtgcagagccggaagcaacggctgaacccactgcttcccccacgccaaacccggaggatgaaatcagtctattagcgctcggcgatgaggcagttacgcgttaccgcacggtaggcatcaacggtaatttcagttccaactatttgtatgatctcggtcaatacccgctctacgatatcctgctcaatggcacaagctatccggcctactgtttgcagcacggtaaaggtcgtgtgaacaatggagcatacgtgcaaagagacaattatggcatgactgaagctatgcgccgcatcgtggcttacggctttaacaacataaattctttgcaggacggcaataacggttggtacagcgccgaaaccgccaaaatgatggtcacacagcatcttgtttggctggcgtccgaaggctatattaccgtagacggtacaaactggtcttggggttccggcatcgataacgatgttgagcgcatggcaaatctggcgtataacagttctgttgtgcgcagctattatgcggagttaaaagatcgtcttttacgctctgaaatcgtcccgtcctttgcaggcaaaagcagcgacggcagcgatgctcaggaaatcgatttacagcttgtaaccggtaagtacacggctactgttactgataccaacggcgtgctggatttgttcgattttcagcaggcaggctttgatatttctcgtaacggcaatacgctgacgatttccacgaacacgctgccggagcaagagacaacgattatcggtgcaggctacaccgtcggcgataaaaacagcattgccgtttgggaggacagagaccaacaggccaacattcagcaccaagcgacttgtccgggcacaacgcagaccatggcgtacatcaaaataaaaggtgaaaagccttcatatacaatcacgctcaataaaacaagcgctgatttgacgattactaacggcaaccccaattacagccttgaaggcgcagtatattatgtttataaagaagctgcggaacccgattatccgtattgggattatgagccgtatgcgacctttaccacggacgcgaacggacacgccgaacttagtaagaaattacagtcaagcaattatgtaacttttgaagccgtagcgccgaagggctactgtgcagacagcaaaacccataaattcaccgtcacgggagaaacaacgctaaatgttgtggatgacccgggcacaatcgtattatctgttcataagaaagacagcgagacggattcggatcaggcttcaggtaacgcttctttggccggagcagtataccgtgtaagctatttggtcgatggccaaatggtttgtaaagatattaccactaacagcaagggcgttacaggattaaataaaatccccctcggccaaatcacggttcaggaaattactgcaccgataggctacaagctcgatccgactgtgcatacgtacaacatcacaacgctcggtaccggtgatgtttatgaactcgaaccggaagactttacggaagatgtcttcaagggcaaaattgcgctgcacaagcagtatgaaacgctcgacgaccgcgcagaagaacaaggcgcagagtttgatgtttacctcaagtctgcgggcagttacgatgcagccaaagagaccgagcgcgaccatatcaccaccggcgcagatggcatggcaaccacaaaggacttgccttacggcacatacgtcgtgcatcaaacaaagggcggcaacggtcgtcagcttgtagccgattttgatgtttcaatctccgaggatggcaaggtttacagctatgatcttgtcaacgtacagaaaaatgcacagctcaagatcgtaaagacttccgaagacggcgtaatcgaaggcattcacttccgcgtgacgcgccttgaggatagctattccgcagagtatgtaacgaatgccgcaggcgaaatccttacggaaacacttccgatttacgcggacaaagacggcgcgaataagtatcagtacaaggtcgaagaacttgatacagaggaaactttcggatatcagcttcccgactcgcagaccgtagaactcagcgaaggcgaaattgcttctgtaagcttccataatgtgccgattgaaatcggtacgaaggccaccgttgagggagaaaaagaagttgatccgctcgataaagttacgctgaccgatacggtatcatacactggccttgttcccggtaaagagtacaaagtaaccggcgtactgatggataaaaaaaccggtgaaaaattacttgtgaatgggaaagagatcaccgctgaaactacctttatcgcagaaacaaagaatggcagcgtagacgttacctttatctttgacgcaaccggtctgcatggtaaaggaatcgttgttttcgaggatttgtaccgtgaaaacgcgctgcttgctacccatgcggacatcaacgacgaagggcagaccgtaaagattaagaatcctgaaatcggaacaaaggcaacagcagacggcaaaaaagaaattacagcggataagatcacgattaccgatgttgtgagctataaggatttgacccccggtaaagaatataagcttaccggtgtgctgatgaacaaagccacgaacgataagctgctcatcgatggtaaagaaatcacggcagaagctacctttacgccaaaagctaccaccggcgaagttgagatgacgtttactttcgacgcgcgtgagctgacggtcgaaactgaggtcgtagcttttgaaacgctttatcgcgacggtattgaaattgcagtacatgcagacatcgaagatgagggtcagacggtgaagattctgccgctgcatggctccatcagcacgatcaaggtcgatgcaggagactcgcagcaccgtctttccggcgctgtgttcggcatctatcgcgatgtaaacggcgatggtcgttacacagagggcatagatacgtttgtcggcaatatgcgcgaaaaagaaaccggtgtgtatgaacttgatggtttgctttacggcaagtttctaatccatgagaagcaggctccgtctggcttctcacaggataaaaactattacagcttcgaaatcacaagagacggggaaaaggtgcagtttgaggttaagcccggtatgaatttcccgaacagcgcattcccaaagaccggcagcagtaatcacggtgtttatgcagcactgctcgctcttgtggtttccggcctcggtttaggtgctgtgatttttcacaaagtcaaaaaagcaagtaaataagtaaaaccggcaatgttgccgattcctaagctacccgtgcagagtgagaaggcccattaccgtttggtgatgggcttttgtaatgcagagcgccggtcacaatcccggtggggcactgcaaatttaatgtaatagaaaggtaaatgttgatatgcatatttttgaagaagcaagcccaacgattatagggcagatggttacgcctaaaaacataggagacttttttcttgaatcatcgtactacttttactgctgggatgatcttatggagttggaatacggtcagtgtgttagaaacaagaaaaaatattattttatctctgagtttgctgaggcaattatgaaaagaggctttttctgcgacaagcctctttatgcggaattcacagaagagcaaattcagaagtatttcagcggcgagtattcagtcggacaaatctttgctcttgcaatatctcaagcccttaatttcacaccagaacaagttgaagttttggaagataaaaacctgaaatgcttggccgtatggattctgtacgatatggtattgggtacagatgtgagagatattagagaaatacttaataaaccgatttttatagaagaaaaggaaaagcaaattcggaacttgcatggtaaaaggcattacttactcatttcccaagaaaactggaaaatggtaacagagtggaacgcatggaacaagtgcgccgatgacggtacactcaattgtattaaaaatttgcgtggtaatttcctttgttcggatgcagttatggatgatgactataatctcattgatacaaatgaaaatagatacttgagcatttgattatagactatattagaagaatttgtaaatttgatgaatgacatagttttgtgaccacataggggcgaccacttttggatttttgaaattctgaaaataaggcaacatagcctatttgttgttttaggtatttatactcgacagggagatataagaaaacttttttagaaataaagacgcgacatgctaatgacgaagaagtatgttcatttgttgcaatacgtctgagaagtagtgtgtgcctatcgtctttgttttccatttctatcgagaattttccatatcctaatagaggagtattataatcttcatctcggaaacccattaaaagattcttgggctgtaagtgttttccttcttgtgtaatttgaggtggagttttttcaatatgaaaattagtagcgtggttagtatttgttttacatatagaagttttttgtggtttgacatgagaaattcgcgtaagaaggctgtgtaactgacgtgatacatagtctctatcttcagagttaaaagagttcataattgtttttgctctatttgtggacagataaagttgggctaaggggcaatcttcagcatgtgattgtttctgtgcagttcgcaaatatgcaggttgatcgtttacatatgtaagtttagcctctttgcagatagggcagaccatgtacggttcatactcagcgcgaaataaaggaatattgcgatatattagcgctatttgaaaaacagaaagttccgattttttgttttctaagtaagcataatcaaatttcatcttcagtatcgcctctaatagtcatataactgttggtaaataacataaatattgtatctaatttgactgtacaatgcaatataaagtttgacggtaaggaaaaagcagtacgtggatgttcgttgacgggaagacgctgtacataagtaaagcgtgaccggcaatattgccggttttatacgaaaaaggagcgtccacaactttagggacgctcctcgcagatggataatgttgaatttgaactttcagaacagatcactatgtgatccggttctggttaagcagaggatgagctcatcgttttgaatttcataaattagaagccaatcgggggtgatatggcactccctgcaaccggcataattgccagacaagttgtgatctcgataattttccggcaaaggcttttgttcagccagaatggtgataacctcttccagaagccgaatatcgtaaccccttttgacgattcgcttgtaatcttttttgaaggtcgtctgatacttaatcgtcagcattcagatcctccatcagctcttttacggaggaaaaacctttgctcattccaattccgttttttgcgtcttcgatagcttttcttgttacggcgttcggtacttcggcgccgatttcaaaaggaatgcgatattcgcgtactgctttttttgcgaaaacggtaaaagcggtcgtcatcgtcatgcccatatcagtgcagaaagcctcgaattgtgtttttaaatcgctgtccatgcgaatattgacgtttgtttgtgccattatacaacctcctttggtacttatattatagcactttgtaatgatactgtcaataaattttcgcacgattgatgtgcaaaatgtagatgataatcgtaacataatacagataagaaagaaaagaggagcgagaatatgcaaaaagttgttggatttttcagtaaaccggaaaatctgtttgtgctgacacttttgatagggctttttacggggacgtataaggtggtgtcaaaggcctcaaatcacaacaatagcttgtatcaaagggtcagctcacctatatgtttctatcttaggctttttgggtatgtatatacccttccttggataggtagtttgttgatttcgggaggaaattatgaagaatggttgcaggcatcaaagaacacagagccatatagatttttcataattggtttggtgatgatcttcgggagttatgcgatgtatattccggtgctgcttgagcgcattgcacgcgggattatgaataaggtttcaattaaaaatgatcttgaactcatcaattcaaaatttggcacaagctatacggcaagcgactatatgtatggtaaagggcacattaagcaaattgtaacttatataagcataggagaagaaagtattgcggagctgatttcaaacccaaaactttcagatgcaaagagaactgtaattcttgaccttcttagtcgtggacttacagtagaccagattaagccctacatacagtcggacgatccgtatacagcggaacagctgcaatttgaactctacaaattgttttttacccaaatagggatcgtcaatagccgcaatataacaaaataacctgcctgtgcagagtgagaaagctcattaccgtttggtgatgggcttttgtaatgcagagcgctggtcacaatcccggcggggcctgtaaataaaaggaaaggagcaagaagctacgccgagcattccggcaaacaaaactgtaaacttatattttcggcaaaggagaaaggcaaaatgaaagaaatgtatggtgttgtgctgctgtacacagaaggcatggcaatttgtgaagatgactgggagaacctttggtgcgctgagatgccagaagaatttgtaacagcaggagatggcattgaaatcgacggattgacgccattagaagatcttccgatggagcagcaagtgcgtattaaaaatgagctggctgcactgccggaagaatatctggacgtgctgcgtaattatggtggaggtgaggagtaatgcccggttacggaaaatatcgttcaccagaggaaaaagaagaatttgtaaagcaactgggtgcagacgccaagcagcgcgttattgaccttgcagaaaactgggaagcagatgcaaaagatgttgcggaatttttgattttttcaagccggttcccagattacagcgtccgcaaccagatgctgatctacaagcaaaatccgtatgctatgtttactgcgggatataatcaatttgaaaaaatgggctataccgtacaaaagggcgaaaaaggtatgcgtatatgggtaccccataatattacctattatcgtggcaaagaaagtgaaccatggaagaggctgacgaaaagcacaccaaaagcagtacgggacatgataaaagccggaatgcttgagacacgtgaagaattgcagttctatcgttatggagtggtctttgatattgcacaaacgaattgccctgcggaagattaccctaaattagtcggtctcggctgcgcagatgagctgcacgcagcggcgtttgacattatcagcgaatacagcaaccgctgcggaatgccggtgcggacgattgatttaaagagcgttgcgctgcgcggatattacgaatcagagacatgcaacattacgattaacagccgccttgctgatacacagcgattatcgacgctgctgcatgagatggcgcacggcatgttgcaacacggtatggataccggcaaaagccgtgcacagcgtgagtttgaagcagacgctttatccgttatgcttgaatccgccatgggtctgccaatcactgacacacgtaaggagcacatgagcgtggagtataagaactacataaccgagcttaaaacgggcaaaacggatgaagaaaaagcggaaatcaatgagcagatcgataaggtttttaaaccaatcggtgatctatataagcgccatgcgccgcagattttggcagcactgcgcttatcaggcattcagccgcagccgataaaaacagcgcaggcagcacctgaacaggaagaaaagacgccggagcacattatggacaagccgaaaagaaaaatgaatcgttcactgtaaagagaaatgaacgtagaaaggagtgaattttttggcaatatcgagagatcaggttgatgagatcaaaagccgcgtgagcattatagatgttgcagcagaacgtgtgaatctatcgcggcacggttcaaccatgtcgtgctgttgtccgttccatcaggaaaaaacaccgtcatgcgtattgtatgagaagaccaattccttttactgcttcggctgcggcacgagcggcgacgtcatatcttttattcgcggtacggataatctcagttacgtggaggcggtgcagcagctcgcccagcgtgccggaataacgattgatgccaaaggcgcacagctcaatcagcgtgagcaggagctcagagatcgtattcgtgcgtgcaaccgagaggcggcacgttacttcttccgttcgcttacacaggacgatgaaggcagtgtcgggcgaacttatttgctgaatgaacgcggtttgagcatggccgctgtacgacattttggtttaggttatgcgaagccggaaagctttgggcttgtgaattatctgcgcgataaaggctttacggatgatgagatgataaccgcaaatcttgcgtaccaaagtaaaaccgggcacgttatggatcggttccgagaccgaatcatgtacccgatttttgatacagtcggcaatgtaattgcgtttggtggacgcgccctgaacaaagaggacaaggcaaaatacataaacaccaacaccacgccggtattcagaaagtccaataatctgtacggatataacttcgcacgcaaggcgcacagcgaccatttgatactcgcagaagggtacatggacgtgatcgcgctgcaaacagcgggctttgctggtgcggtcgcttcactcggtacatcgttgacggaggaacaagcaaagctgattgggcggagctgcaaggagcttactatttgttatgacagcgacagtgcgggcatcagagcaacgcaaagagctatacaggttttgcgttctgcgtgcccagagttgcgcgtcagcgtggcttccttgggcgaaggtaaagacccggatgagttcataaaaatgcactcggaggacggagcagaacgtcttgctgaggctttcaaagcagcgataagcgataccgaataccggctacaaatgtgcaaaaacgggttggacatgaacgtgaataaagaccgtttgacttatgccgttgaagcggtgcgtgtgttggcgacggtcgaaaacccggtggaacaggatttatttgcggcacaaattgctgcggaggtcggagttggacgtgagagtatcttagcacaggtgcaggcagctgcgacagacccggcaaataaaaccgtgccggaagaaattaaagacgaggaaatttttgagccggaagaagaacctacacagcgctatcatgcgtttattcgcccggtttctgacgcagaaagtgaagtggtagcctttgcggatgtcattataaacgaagactaccgcatcaacggcgtgcgtctggtgttggatgaacacaatcgattttcggccttgatgcccgcgtatcttgctaaagataggcgtgaatgggttccgtacgtcgagctgaagccggagattgaaagggaaatgacggcgttccttgcacgtaattttgatttcaactcggaggttgaagttatcggcggcggtacggcgatagacgtcggagagacaaagctcacgctgcggaaggctgcaaaccgcaatacggttaaagcgtatgccgagctgcaaaacgatgtgtttgcgctcaaatacggcaagatcatggagggcaaacgcgggtatttctattcaccgccgagcatgggaacgtacacagatcaggacggcaataagcaatatcagtatgcgtatgggtttgcttccgcaccggagcgcacaagaatttcgggagaaattaagaaacaatacgagctcatgtgcaaaaaaaacaagcgggtctatgaagcaaaaatcaaatagtgaggtgagattttgcagacgatttatttagttaccggacttcctggcgtcgggaagacgagctttttgcaggtgcttgaaggcttaaagctattgccggagtacagcgtcacgccgcagagaatcgcacgaatctacaacagttcggaaacgtatgcgatgcaaaagcttattgacgacgggcgcagttttctttgtgagctaccgctcgagcaagaaaaaatggaacagtttttcggtttacttgagggcaaaacgtatgcgataaactgctattgtatgggtctgccggacgcagcagaagccatagcgcgattggtgcggcgagatcgtacaggtgttccgactgcgaaaattttggaagattttgaactgttcccgtccaatatccgggagctttcaaggcgtgtagaaagcatcaagttcttcgataacacacatgggttttgcttgaccggctattacagtgcgggaaaatttatgctttcagatgccggtcattgcgtgccgtggatgcaaaccgttagagctgcactgcttccgaatgagcagcaaattacgccggagagtgtgtggcagacagaaatttttgaaagaaaggtaaaagaaaatgaagaaaaatcagatggaaatcgtggtgaagctcaacgtaagcgcggaaaaaagaagggcgctcgagatgtactgcacggacttcgcgggcacaatgcaaaaggatttgcaggcagcggcggaacagattttaacgcaaaaatataacaagtccgtgccgaaagccgtgcgcgaatacgtggagttgtgcagagacgaggaaaattcttccgctgcaacgagcgaaaagtaatccactttttcgcaaaacgcagtgaaaaactgcgggaaaccttctccttaatcagcaaatttctgtgtctgccggacatgtttttgcgtgcggcggcgcaaaattttgggcgaactccgttcgtttttttgctatcagcaaaaaagatttgcggcggaagccgcccgggcaaacagaaaaagcgcgaaacgcactttttctgtttgctttcgcaagcataccattcttacgtaagaatggtagatcggtgaaaatcaccgattttttagggacaccctaaaacccgtcatgcagaaagaagtgagacaaataagaaaaggcgaatacaaatacccttaccgtttagagttgcgcttaaatgaaacacaaatggcacgtctgcaatccttggcgagcaaatccggcttatcgatgtcggcgtatgtgcggcagcttatcgacggtgtgcttccgcaggaacgcccgccgttggatttttataagatgctgacagagctgcgttatattggcaacaacatgaaccagcttacacgcatagcacatgcgaccggcagaatcgacagagagaaatttgagcggctgaccgatgagatcaagccgctggcatctatgctgtatcgctacgttacggagccaatcaaacgcgacccgatgacttcggagcttgggacgtatatccgtaagtccgaccaaaaggcactgaaagaaaaacgggaggaagaacgaaagtggcggtaacaaaaatctggaagatcaacggctggatcggcgactgcctgctttacatcgaaaatccgaacaagacgcagaacccgttggtgatcggtgatccgaaattaaaagaggaagaataccaatctctgacggatgtgatcgagtatgcggaagacggcaacaaaaccgtgcgggatactgagcgttttgtgtccggcgttaactgcgatgcagaaacggcgcggcaggaaatgattttagcaaaaaatgcgttcgacaaaaacgacggcatttgtgcctaccacgccatacagagctttgcgccgggagaggtcacgccggaaacggcgcacgagatcggtattcggctcgcaaaagaaatgtggggtgaacggtatcaagtgcttgttgcaacgcatttagatcatgagcatatccacaaccacttcgttagtgcgcccataaggggcagagtaaatccgcttagcaagcggcaggtgtgaggtttcaggcctgtggtcaacggctaacctggcggggaaacccaaaggggacagcagcatgaccgtaaagctgcaagttggcaagttgccgtgccacgactgagcagcaagaccaaaagttcatataaggatgaaacctaaactggctgaacggcagtccgagggacatttgtggtggtcgtaacggaaggcagctatacccgttacgctgtgcatctcacctgtagaaacatgagcaggatgagcgaaaccgaatgcacagtccgtatgtatcagcataaaaggacgaaaaccgcatccgacaatgaacaatgcttttttactctgctgctaaatggggattgcctaagttggaacgctcacaagagctatgggcgtaggccctgaatatccaatatggcaacggagccgccgtagtagtccgagcgtattaatggcacgcacatggcgaagggcggcagttcattcaattcaatacaacagaaaggaaggtgcgtgaggcactatgagagatccagaaaatgtattgaacagtctgcaagaacattcagctcaatccggctatgtctatgacaggttgtaccgcaacctgttcaatcgggaatttttcttacgggcatatcagaatatttatgccagtcagggaaacatgaccgcaggcacagacggaaaaaccatcgacgcaatgagccttgaaagaatcgacaggcttattgcaaccctgaaagacgaatcctaccagcccaaaccgtccagacggacatatatccctaagaagaatggaaaactccgtcctctgggtattccgtccattgacgacaagctggtacaggaagttgtccgtatgctgttggaatccatctatgagaacagctttgaggacgcctcccatggctttcggcctgacagaagttgtcacacagctttgaggatgattcaaaatcgctttaccagatgcaagtggtttgttgagggtgacattaaaggattcttcgacaatattgaccacaatgtcatgattggcatccttcgcaagagaattaaagatgagcgttttctgcgccttatccgtaaatttctcaacgcaggatatatggaagataaccaactgcatcaaagctacagcggcactccgcagggcggcatcattagtcccattctagccaatatctatctcgaccagttcgacaaatatatggctgaatacaagaaacggtttgaccgtgggaacaagcgagccgtcaatgtggaataccataagctgagcgcaaagagaatccgactcaaaaggaagctggcaaaggcacagtctgaggaagaaaagcaatcccttttggaaagcatccgggaactggataaggtacacaaatccatcccctgcaaaaatccaatggatacaaatttccgcagactgcaatacgtccgttacgctgacgattttcttatcggtatcatcggagccaaagaggatgcacaggctgttaagcaggaaatcggcgtatatatcgccgaacagttgaaactggaactgtcggaagaaaagacgctggtcactaaagcaacagaccgtgcaaaattcttgggatttgacatcagggtcacaccgcagagcaatcacaccaaaaagacaaaaagcggttccacagcccgaaactacagcggccatgtaatgctggaagttccgacttctgtcattcaaaaaaagctgctggaactgggagccatgagaattgatgttcgcaatggaacagagatttggcaacccacgtatcgtggaaaacttgtcggacgaacagacctgagtatcctagaccagtacaatggtgaggtgcggggattctgtaattattatgcgattgcaaacaatcgctctaagctgcacaagttccgctatatcatggagtacagtttctataaaaccttggcctgtaaataccgtacaaccaaaggcaaaattattgctcaatatcgtattgtcaaggacatcggggtaaaattccaggacaagcatggaaatgagcgcatccgactactgtggaaggacagtcttgcaagagacccctatccgctgggaaaagaagcagatattatccataagccgaaaggcatcctgaaaaagcccagtctcggcgcacgattaaaagcaaatcggtgtgaatggtgcggaaaagaaacttcagcgttggtaatgcaccaagttagaacgctgaaagagctggatgaaagccaaccgtgggcagttttcatgaagaggattaaccgaaaaactttggtggtctgtgaaagttgtcacacgaaaattcacggtgcaggctgtgaatgaatagagagccggatacagcgagagttgtaagtccggttcgggggcgagtgcctggaaacctaccgcagcaatgcggcaaggcgctgggtacttagcctactcaactcggtttcgtttctggacggcaaacgcttatggaaagagaaaaactattggcaaatgagaacggtttcggatgcactttgcagagagtatggtttatcacttatcaagccggtgcgccgaggtatgccgtatgcagcttggcaggcagaaaaagaaggaaagccgaaccggcgtaaagcgctacgcgaagacatagaccgcatactcgcaaatgaaaatatagaatcgttcgaagctttttacgatacgctgcgggcgtacgggtatgccgttatgacggatcgaaagtatgttgcgatttgtccgccgggcggtgaacgaaatattcgtttgcagtcgcttggagaaaactacgagccggaagcgctgcacttgcgcattctccgtatcaaagcagaccgactgctcggtaaaaccaaagttatagaacagccgatgacgcccaaaaggaaaatgcgcttgcaaggaacggtacgtcgaaaatctaaagcgcatggaatacgggcgctttattataaatggctttattatctcggtgtttttaagcggcgtcccaaagtatacggcagcgcgtttgccacggcgcgttggcaactgaacgcatacataaagcagttcgattatgttgcggcgcacaatattaaaacgcgcgatgacgtagagcaacggttacgcgtagtgcagcacgaaatctccgggcagattgatgagcgggaagaaataagagcagtgctgcggcgtttggagacaggcgatgctgaaatacaggagcagcttgagaaaatcgagaagatcaacgcacaactcaaaaagctgcggacagaagcaaagctgtgtgtgcaaatcctcgagcagcagccgcagatcaaatccaagatcgacaaagcacatgaagtaaaaacatttgaaacagaaaggggaaaagaaaatggacgaacaagcgatcatcaccttgagcatcgaaggaacgaagctgctcctacgcgggagcaaagaagttctggcagcgctcgtagcagcgatccgatacagcgcagataaaatgatcccggcgcgaaaatgccgggattttttgacgagtacatcggaggtgcgctttatctcgatgagcgatgaagccatcgaaacattcaaaaaggctgcacgaccctatggcttgcggtacttgcatttgcacgacagtaacggagatgggttatcgaccttaatggtgcgcggcgaagatgcagcagttatcaaccgcctgatcgagcgcaataaactggctgtgctgacggatgttacacaggcggaaatcgaacgtgatccgtctaaggctgcggacatcaacgaaccgattccggaggttgtgattggaaaagatcaagttcgagtgcaggatgcggttaaagaggcacgcggcagcgcacaagaccttttaaagccggagccaaaccctacgaaagggcagacggaacagaaaagccgtctgtcctccaaaggcttgaagacatccgaaatggaacaagaggctgaagaactttgggcagatgttacggcgtctattgataaggactttgcagagcgaatcgaagaaaagcgtcagcacaattttgaactttataaccaagacgacccgctgctcggcgagaaggttgtgaaaaccaaacgtaccgtgccggtacaggacaagccatctgttatgaaaaagctggaggctgcaaaaaacgtcaacacgcaaaaagaagcgagaattgcggaagctgtgcgccagatgcaggcaggtggacgtacttcaaataccgataaggtcattcagaagacgccgaaggtgaagccgcaaaagctgagaaggtaggatggtgtgtatggcaatatcaaaagaagacataaaacctttggcttggtcggcggaggatgaaccaatgttccttaaggacgacgaaaataaagacggaaaaagcggcaatgttgccggttctgcggatacgattttacgcacacgtcgcattttcaaaatgaagaagaattccggcggcagaaaaaaacaatcatggaaagcgctgaatacacgttggctaatggcgcgggatgagatgttcgtcaacgagcgtttcttggagaaagtgttgcaggttatgggacgtatgcggtttggtgtcaaaaactcaatgctgatcgcattgcagaatgagaaggcaacacgtattgcaacggctgcatcatggcgcggcttaggcgtgcagcttctgccgggtgcagaggcaaaaccgatatggttggatgcaggagcagacacgcagcgaaaaaccatagtaccgagcaaatggtatgacattacgcagacagatgccggagaaaaactgacgctgaaaggtacgatctataacacgcttgccatttgcaggatcactctaaatcagatcgacgagctgaaaatcgtagaacaacaaggtgtgacgggcatccactatgaccgtgaagtacatgcgtatcttgtgcagccggggcagatggaaagagctatgctttgctacgccgcgcttgaagcattggccgaaaaagattttgcgctggtttttcaggagaatgagaaaacagcgctgccggatacaccggcaaatgagatcattgcaaaatgtgcagcgtatattgtatgcgtacattttggcgttttgccgcaggaagtgtgtgtgcgcgtcccgacggcgctcggcacagataaaattgaaaatctgctgcgggcgttatccacagcgcagagcatcgcagcacaagaaattatggtgatcgaaaatcgacttcggtcaaagaaatggaggacaatatgatgaaaaatgaaaaagaattagcggcaagaggttgcttgtgtgtggaaccgagttcaccggaatgcagcgtaccttatatcgttacagaccccaaaggcgagttgcggcattatgaggaaaaaataaaggaaaacggttataaaataattgtgagcgagttcaaaagatgagaggaaaaaatacattaacggcttggatcatggcaggcatcggggcggtatttgtgctttggcttgcggtgctgatcgcgccgtatgcagagggcggcttgcccgggattttgctgaacatgaatgagatcactgcacatccgtttcggttggaactctgtgccgacacaggaaaagccgtgggcatatttctgggcggttatgcgttagtgcttttatacatatttagctcacagaagaattttcgccacggcgaggaacacggttcggcaaaatgggagaatgtgtatctactgaaccaccggctccacgacaaagaacacccggatgaaaaccgcatcttatccagacatttgagcatcacaacggatcagcgcaagttagataaaaacctatttacgcttgttatcggcggctccggctcgcgcaaaacacgagcgtacgtaaaacccaatttactgcaatgtaactcatcttatatcatcatggacccgaaaggggagctgctccgcgatattggcaatgtatttaaggcagagggttacaaaatccgtgtctttgaccttattgatatgctcagcagttttcggtataacccattcgtctattttaaacgggaaagcgacatacaaggctttatcacgaacttatttgcaaataccgaggataaaacgaaacatggtggtgatgccttttgggacaagacggcgaaaatgatgctttcggcgctcatgtattacgtgtggtatgaatgcccggagacggaaatgaatttcggaacagttatggagctgatccttgccgagaccgtcgaagaaggcgatgaagccggtatctctgcgacacaggtgctcattgaggaactgcgtgccagaagcccgaggcatatagcggtgcgctactttgatgcttaccgtaagggtgcaggggagacgatcatgagtattcaggaatcgcttctcagccgcttggaaaagtttttgcttgaagacgtggtaaacctaacgaccggtgatgaattggaactcgaaaagattggcgaagaaaaaacggcgctgtttatccgtatgccggacgacaacagtttccattttctggcatcggcgctcatcacacagctttttcagcttatgatggcacaggcagatgcacgcagcaccggcagcttacccgtgccggtgcattttgtgctcgaggaagcgcgaaatattacgttgccggacagcttccaaaactgggttgcgacgatgcgttcgcgcaacatcacattatcgattattctgcaaaatatatcgcagatcaagcgtatgttcccggacgactgggagtccgtgtccggcatgtgcgatgagatactatatctcggcggcaacgagcagagcacacacgaatggatttccaaagcgatgggacaggaaacgatcgataaccgtagctacggtacaacgcatagttggacgagcggcagcaacagcaccaatgagcaaaacagtggccgcgctttgatggatgtaacagaggtacgtctaaaaaacaagctgctgaaaggcaaaattggcagcgtaattatgatcttagccgatgagcggccgataatcgacgaaaaatacgacctgaaccggcatccgagaattaagctttcggccgacggcggtgcgccgcagtattcttatgtttcgtcagcgcttttgccggaaacgaacacaatacagatcaacgaaacagacgttgatgaagacgaggtggacggtatgtttacctttgaccttcaaaatgtcgaactaaattaaaggagcgattcacatgagaaagtttaatttgaaccgagtgggaaaatacgcacggtacgcatactttgcgatggcaagcgcaacgctgcttgctatcccctgctttgcaagcaccggtgtggcagagattgacacaccgattaacaatttgctgacgatgtttttcgggttgctgaaagtagtaggtatatttgtaggcttatttggtcttgtgcaaatcgtcatggcaggatttagccacgattctacgaagcgcattataggtgttacgtgtattatcggtggatttaccctttgcttcgcacagcagattctgacgttcctcggtatgacaacagcataaaagggagtgaactgctttgtatgaacttgtgctgcaatttttaacacaaatattcggcttgatgtactcggtgctgacggaagatctctcagattttagcccgcacgcatacgagtatatttcaattctgaatacgatattgaaagggtttgcatcatcactgatgcttgttgcattttgcgtagggtacatacaatccgccgtgtcgctgatcgagcaaaaaacgccgattgcaatattcaaaaccttggtgcggctcgtgatcgtcaatgctctggtggtacgcggtacggatataatcctcatgccgatgttctctgttgtccgcagcttaacaagccgcctgattgaggcgatgggcggacaagccggacttcttcccaatatagacgaaagctcaccgggcggtgttgccggtgcgataggcgagctgctgtccattaacatcctgaccggtattttatatattgcggtcattatcagcggtctggttttgctgctgacggtgttcgggcgttttctcaaagtctatgtctatatgtcgatagcgccggttccgttggcgttttttgccggtggaaatgtaaccgccatgtatggccgcaactatataaaaaacgtgttcggcgtttgcatggaagccgttacgatggtaatcgccatacagctgttttgcgcgatagcggatgatgctgtgatgacacaggtaggcgggatgttgggctttctgggtacgatggcgaaaccggtcatgctgcttctgtacttgtcgtctctcagcgccattataaaaggtgccgacaacatgacgcataagctgttgggatttgtgtaaggaaggagcgaaaagagttatgcaaatcaaagtaaaccaagaaatacgagatattaaagatgagttcctatccggtttatctgtgcgtcagactatttggagtgctgcagcgctatgtgcgggctttatcactttttggaatgtatatacgcgtttcggcagtaccgatatggcatcgttccttacgttatgcgcaagtgcaccgttggccttgataggcttttttaagtggcataaaatgcccgccgaacgtgtggcgttatgctggctgcatgcgctcttgatgcctcgcaggcttgtttttaagggcagcaatatacacgcaaatgagattgaacagctttgcacagccgcacgtgcggtcgagctgaatgaaatgaagaacagaagggagaaaggcaaagatgctttggaaaaagaccttgaggggcgcggagcagtatcaacagggaagcatgaaaattccgcgcagcacgcaggagatgatcccggtcaagcacattctgaatgatggtacattcgtacttgacagcggagaatattccaaaatgtttgcgtttacggacatcaactacacggagctgcgcgatgaagaaaagatgcgtcggcttgtggattattcagcactgctcaattctatcgataaaggcatttacgcgaagatcagtattttctttcgaccgatacggcaggagcagttcgagcgcgatgtgttgatcccgatgaacccggaagatgagttggatgattatcgggagaatatgaataccgtactgcgggaacaggtgcgcggtacgctcggcatgacgaagcaggcgtatctgacgataacagcaggacgaagaaatgatgaagatgccgcagcgttttttgctcgcgtggagggaaacttaatcagcagttttcaggcgctcggcgtggagctgcgtgctgtgcctttgtctgaacgtctgcgtttgctacacgatatttaccggccgggtttagaggaaactttccgatatgatgctcacgcagaaaaaaagctcggcatgaactggaaagacagcattgcaccgctcagtgcggaagctctcaattcctgtacgcatttgaagatcggcggccgatactgcaaaacgctgttcctgaatgcctatccgatatatctcaacgaccgcattgtttcggatattgcctctatcggcaagccgatgatctttacaatcgattttctgccgataccgagcgccgaagcgatggcggaggcggaaagccgcagtatggcaatcgatacgaaaatcgtaaactatacgctgcaccaacagcgcaacggcaattacagcggcagcgtgccgtataagctgatgcagcgtgcggcaggagtacaggaagtcatggaggctatacaggagcgcgaccaaaacttataccttgttaccgtcaccgtagcacattttgccgatacgcgggaagaactggaaaacgatgctgaaagcatcatgagcaaaggaaaatccatttcctgccagtttcttccgctccttgcgcagcagtacgaggggctgaatacggcattgccttttgggcgtccgtttattcaggcggatcggttgctaacaacgcaggcgcttgccggtatttgcccgtttgcagcgcaggaaatctattatccgggcggctcgtggttcggtattaacgcaaagacgaaacgcctcatcactataaatcgcgatatgctgatgagcggcaacagccttgtgttggcgacgaccggcggtggtaagtcgttccacatcaaggaggacgctttgcaggtcgcactgaaaggggaggcagacatatttttcgttgacccggagtgtgagtatgttgtggcgacacaaaggcttggcggaacggtgatctccttatctccgtctacacagcacaggatcaatccgcttgagatcaatgccgaccccgatgaccgcagcagcgaaccgttgaaagaaaagcttgaatttgtcatgtctttttgccgtatcttgcttatggaagatggcaacgtgcttgacggcaaaatgaaaagccttttggatcgttgtgtgcgaaagctgtatgcgccggtcgtggcgtccggctatacgaagccgtcgccgctgctcggtgatctatacagtatgctaaaagaccaggatgcaccggaagcacaggaactggcgctgcgcatggaaatttataccgcaggctcttacgatatgtttgcacaacccacgaacgtcgatacacaagcgcatatcatcgactatgacctttcaaagcttggcgaagggatgaatgcagtcggtatgctcatcgttcttgaatcaatttacagccgcttaatggataactggcggaaaaagaggcacacgtacatttatatcgatgagatcatgacgatttttcgcaacccgtatgcggcgcagtattttgcatcgctttggcagcgcatccgcaagcgtggcggttatatcatcggcgcgacgcagaacacgacagaaatactcaatagcccggaggcacgcaagctgctcgaaaacagctacatcatcacgatgctgtatcagtctgcaccggacagagacgtgcttgcggaaatgtttagcttgtctgaggcgcagaagcaggcgcttgccaaggagcagtacggcacagggctcatcaaggtcggcagcacgattgtgccatttgaaaacgatttcccgaccgataatcccttgtatcagctgatgtccacaaagccgtctgacggatgggggcaagaagtaaatgaacattacgacgtatgagaacacggtaaagaaaggcacgatcaaggcgcacgggcgtagtgacggtttacgggaaatgtcggagcagctctccgagatgcaaaaaatcgtcattgcaccgatgagcgttgatacgccggagcaagatggggacaaagcgccggaaacggttgcggcagatcaggttgtcggccgtgcaaaatcgacggcaggggcggtcagagatgctgtgacgagtgagatcaagcgcgctgtgcgaaagagtaaaaataaacccgttgaacgaggcgtgcaaccgttggcgaagaactctccgtggcggcagacatcgcgtgcaggaaatacggtgcaggcatcgcataaagctgcgtctaagactgcgtatagaagcacttccgaagcagtgtcacatacggtacgcgccggtgcgcaagttgcacagcaggtagctaagacggccactgtggagactgtaaaagctacggcaaccgtaagtgccggtgcagcgacggcgggaaccagcgtggccgtacaggctgcggccgaaacggctaaaaaggtaacggttggcacggtgcaaaaaatacaggaaagtgcgcagacggctacggctgtacatgcgcacgatatggcacgtgcggcgcagcagcgcgtagcaaataaaacgaaagatgtacctgcgacggacgccaaggggttgcctaaagttctcatggcaatttggatcggcgttgttgtgctattattggtcttttcaaacagctttggcagcttagcgagcagtgccggacgtgcgataaatctcaatgaccgcgtggaatcttaccgttcatccattacatattgggcacagaaagacggtatttccgaatatgttgaggttttgttggcattgtgtatggcggagaccggcattttggatgacccgggagatccatttgcgtgttctgaatccggattggcggtaaaacagccaaacggcataactgaccctgagtacagcattgagatcggtgtatattgctttagcctcaaggtgaaaaagaccgggtgcaaatcaccggcagacaaaaataatttgttcaaggctttgcaggcatacaacatgggcgacggctttatcgatttctgcgatacatattacggcggggtatggtcagtcgagtgcgcgagagcttattcggaaaaaatgggcggcggcagcacctacgggaacccgaattatatcgagcaatttttgcgctgctatacgttcggtacgatttcgggaacgtatccgggaagtctgaattcacgcggcctatgcgcaccgcttgaaccgggttggaaacagaatatcacgcagcatttcggcggtatgtacagcggttcgccgcacaaaggcatggacatcggtatgccggagggcacgccggtatacgcggctgcagacggcaaagtgaccgttgcaaatgcgtcggattcatggggctactcatggggctattacgtcaaaatcaaccatgcagagggcgtagacacgctgtatgcgcatctatccagtgtggcggtatcttatgggcagtatgtgcatcagggcgacgtgataggctacgtgggcagcaccggcaattcatccggcaaccacttacattttgaattgtatttagaaaacaacagagttgatccgtatccgtatatcgggacggatttactcagcaagtaccttgaaaggacgttttaatatgacaatcaaacaggcttttattggaatcgttacggctatcgcgcttgtgatcgcggtgctgatctcgcagatcgtgcgcatcaacacgatgaccggcgacctgcaggaggcacagacacgtatagaaacattggagaccaaagccgcagcaacaccaaagcccacggccacgccggaaccgagcacggaaccgactgcaacgccggagccggtggtctacgtggtgagcccggtcagcgaatttaatgcgtataacgtagaagcagcgccgtattactggctgcctgtcccggatgcagaggcagacgggacacttgaagccgggacaaacatggtcgtgtctggcgtttgcggagagttttactacgctatgctgccggatggcacatatttctatattccgcagtcggccgtagcgcaagtgcctgaggctactccggagccgacaccggaacccacacccgagcctgcaccagagagtgtggtggaagcaactccgaacccttaaaaagttcaataccctttaatttaagggattgacagaataaagaaaatttgttatactacccttgaattaaagggctttttagattaggtgattttaaatgtctttcttgaatatcaaaaatacaattataccaagtgtaactttttcggggagaaatttacgtttagtgcgcgaatatgcagatataacgggtggcaaaggcgtaaatgtactcaattttattgttgacatgatgctggcaatgccggaaaaagtacgaatgaatttgcttgagttttgccaaatcaatatacagcaaattgagcaaaatatggctaaacgagagtatagtaacgatctcagcgtgaagcgtagggtcgcctatcaaagacttgagagatttttatcggacgaaaattgccaaatggatattccaaaaaaagaaaaaggcgaaaaaattaaaagaacaatagaatttacagcgacaaattacgggttagtaaaagaaaaagcaaaaaaagagaaaacaacatttggtcgatatgtaaactatctcattgttttgactttagatataccggaagaggtcaaaagtgagctttctgtctttagctctgcgtcgctaaacgaaacaattcagcacagtgaaagcaaaagccgttatataaatgaactgagtcgtgaaatgcagatgcactacaaaaaaatggaactcttctggtgtaataatcagcgtgcagcttttgatgggcataaaagcatgaaaaaaatagacatgaaagacgggtatattatatacccgagtgattgggtcgtgcttgaagatgtattacgtgatcccaaagagagctcacgtgcaagtgttgtagaggtctataacgggcgacgttatgggatgccacattttttgcttttttccaatatagcaaaaaatgaatcttacaccgaagacgaatttaaaataattgaagcagcgtgtttgagagcgaattcacggtttgctgatgttttaaaagacgaacagtcaatggtagatgaagaaaagccagtcgtgggtgtttttaatatcatagcgactgatgacccgtattatgatgaatttgatacgccgcctttcggctgcaaaatcatccgtgacataagtaaaagcaaagactaaatccataaaagctaacagactaaacgcaaaggaggggcaagaccgatgaacgacttttacgcgacattagaccttaatatcagcagccttacccctcgtagcgtaaagctgttagcttttttacaggcgcatgcagacaaagagggtgtttccttttggagcaaacgaaagacctgcgaggcgctcggaatcagtgaatcgacctatgcacgtgctttgcgcgagctgacgcgtgcgggcttagtggaagttaagccgcgctttgatgagaacggccgtcagcgcagtaatacataccgcgttgtgaacaccaaggggctcaaatatcgcgcagacatggatgatgtagagaagctgcaccaccgtgaagtgaaggtatacagccagatcatgctgcaaatcggtgaggatagctgggcgatttcccgccgcagccttgccgatgcgtgcggatgctctatgcgctctgtttcgcgccttgtagcagccttgcgcgataaggggatcctttgtgtgcgtgcggaagatcgcagttttatgggcaataaggggcagagcttcaatcgtttccgtcggtacaaaccggcggaacttttgcttttgcgctgtattttactcatgctgctttcttctttgaatacccccgtagtcaaatgtgacacccctatgaacccttacccccagctacagtttttatgcctgattaaggagaaggggtatacggtatttagagtttacaggaagaatagagtaaacaggaagaatcaactataccgcaagtataagcgtgcaaaagtggcgctttgcggtggggaaaggaatatcatgacagagatcatttatgcaaaaccgcagtacaagcagtcccgtatgccgggaaaagagctgtgttggcgtgtgccggaggacatgccgctaaaaaatgagaagtgggcattggttccgtgcaaggaacatctatatcttgtggaaatcttgcgcaaggagtgggtggaggacaatatagccgagcaataccgtcgtgtttacgcgataggcagcacacgagaagagttaaagccgccgatagggcgggtgcatctcatcgatgcagacaggatcgatatgcctggcgaagtaagctatcacgccgttgaaaactcgaagctttctaagccggacgtgatggagctgctgcaatatcccatcggtgtgacgcttgaaacgggcggtcgataccgtgtgtttctgggggcatatcggttttggtatctgcgggagtgcctgcactggacgaaaatcccgtgctatgtttacaaaatcaaacggcagatacgtgatcctcgtgaacggcgccgccgggaaattcatcgcaggcagcaggcggcagaaagtccgcgtatccggctccaactctatgagaattactacaagctgctgaaaggcatgaaggacgccggtgagatcaaaggcggtttacagacgcggctgatgcagcttctcggcgtctccgaacgcacggtgcgcatctataagcagctctcagaacaacttaccgggcgagaaaagcagcgcttaatgcgcggtaagctgccgtttgtgcaagcacgtgccattgccgcagagagaaatcaaaaagcggcaatgttgccggattttgaaaaagcagagaagaccaaagacaaaaacctacccgccggtagtggtgagtaggcttttccattttaaaaagcggcaatgttgccggttaggatatttatgtgctcgtatagtcttgacatattagctaatatatagtagtataatattagctaaaggaggtgctggaatgatctcagcaacagcaacagaaatgcagaataattttggcaggtatctaaatcttgttatttcgggtcaagaggtgatcgtaacgaaaaacggccatgaggtgggccgcttcgtccctaaagatatggcaatttcgtatcttacggattcgctgatcgggattttaaaaaatgatgctgaccttgatgaagtgcgaacagaaaggctgaaggaaaaatatgaaattgctgattgatgcgaatatcctgctcgacgttctgcaaaatcgagagaattttgttcgggcttcttctatggtgtggaaactctgtgagaccgaacaagccaaaggatatatttcggcgttaacatttgcaaatttagtttacattatgcgcaaagagatggatgcacagagaattgaagaagttcttcacatgctttctttaatttttgaatttgcagaattgaatgattcggatttatttcgtgcggctgctttgcaatggcctgattttgaagatgccgtgcaaagcgttacagctgaacgtattcatgcggattacatcataacgcgtaatgtgcgtgatttttcaagaagtaaagtcattgcgttcacaccagatgaattgcttgctcgtctttaatcaaaaagcggcaatgttgccggattttgaaaaagcagagaagaccaaagacaaaaaactacccgccaatagtgtgagtaggtttttgtcttataaagaacaactcttatgctgtaaaatttagtgctaaattagatgttgaatttatcgtaagatatgagtataataaaagtagattatgaaaggagtgggacaatatgccaaatatcaaacctatttctgatctgcgaaattacagcgatgttctgcgagacgtagctattggtgcgccggtttttctgaccaaaaacgggcgtggccgatatgcaattctcgatatgcaggattttgagaagacgcaggcaacacttcggttaatgaacgagcttgcaaaaggtcgtaagtccggcgaggagaaaggctggctgtcgttagaagacgtagaaaaaaagcttggggttacgaatgaataatttgcatttatccgcagaagcacaaaatgacctcatggagatcaaagcttatatcgaagaagatttgctgaatccctccgcagctttgacaacggtaagccggatcacaaaaagtttgcgagttttgcagaattatgcgtacgccggagcgttgctgtcttcgattgcggatatagagagcgactacagatttattgtaagtgggaattatatcagcttttatcgcgcttgtggcaatgatatttatatcgaccgtatactctatgctcgccgcgactatctacgaattctgtttccagaactataaagtgcttatatgggcgaaaagcggcaatgttgccacttttgctctggaaaatttgttgcagagacttatttgtatttcgcgttattttgagctcaatgagtttttgcactgggcgatgggaagcaaacagataatgactttgttctgcacagaacaatctacaaatcattctacaaatcttcaaacctcttttttgccggtctcgaatatagtatcaaatcaagatttactaaatctaaatttgttttatttggagataccctatatctattaaaaaaggtttcaaccccaaatgctgattatgcggcagaaaacgaaacgcagctctatacccttaatcaaatcgttcattacgcataaaaagcagaggatagcaaaggtaaaacctacccgccgatagtggtgagtaggtttttctattttaaaaagcggcaatgttgccggtttattgctgtacgcttgaaagacggcacatttgctcgtagagggatgtgtgatccgggtggacgtaccggcggagcgtaaaggccgggttggagtggccaatgataagagcaaggctttttgcgtccgagccgttttcaatcattcgggtcgcgaaggtatggcgcagcatgtgcggcgatacgcggcgaattccggcgcactttgaagtgtacaggcaaatgtgccgtaagtgaccggcgcttaccggttctgcatcgccgaatatgtatcggttagagctgcagcgcttagcccagccttgcagatgtgtgagcataagggcgacttcgggaatcaccggcacgctgcgaatgccgttctttgttttgcttttttcaacgcgcagaaccttggcttttttatcccagtcctgccagcgcaggttttgcagctctccgcgccgcaggccggtcagaagaaaggtttgcagaatgaactgatctcgaatcgtgagttgctttgcagcttcttcaaacgcttgctgttcttcgtgtgatagcccgttgatgactttttccgaggcttttttggggacggtgacaccattgatcgggttttccgtacactggtgattctcaatcgcggtttggtaggccaagttataaagcgacttgatatgccgtaaagatgattttgcgtacttctttgataggtcgttcaaggctttttgaaatgtgaccggcagcagttcggtgagcagcgtgctttcgatttccgggaaacgccgcgataacctctttcgggcatctcggtagatttcgagcgttttcgaggcatattccggcacggcgtatacctcataccaaacatccagccattctccgatggtacagacttttctttccattgtaaacctctcctgttagataaaaattcccgttagggttaattcagtttaacagtgaaaggaaagaaaaacaaaaaccggcaatgttgccggtttcagcttgtcgatatagaaacagctctgcctatttatagtgctattgtaggagaagtgaaattttatgacaaaatcaaaatttgaaaccgaaaaagaaaagtggataaaacgcggtgagataaaaacatacaatatgactgaacttttgacctatgacgagaagcaaacagaagaccatttggccggtgcagaagtgtgtgcatatgcagcgtacacgtctcgcctacatgtgatgttgtatacggtacagacggtttggagtatcttaccaaacggggatacgggtgatgttattcgagaaaattataaattgttgcttgcattttgaagaattgaacggatgcggaaaaaccggcaatgttgccgttttttttctgtgtgaataaagatcttgccagaaaaggatatttctggtagaataaaaacgaactgcaatacgcagttcgggtgctgccataacggtggacggttggccctcagatgcggattttccgcaccgtgtgagggaacatttcttgaatatgaaaaaatccctcaatccaacacggagagagggatgatagacatgagtgattttgaacttttatctttggtcgtgatgaccgcgaacttaatcgtacaaatcctcatctacataaagaagaaatgagccgccctttgcccaaaagtgtacgactcattttttctgagtatcattgagggttaaccgttcatcggcagcactctttctatttctaattataaacgcttttggtgttttgtcaagcacaaaaaccggcaatgttgccggttttcgatgagagaaaaggcggagacgggttacgcggtgagcaaaatcgcgacaccttgttgaaaaatgcagaaaaattttattttgcgttgacgagcggggaaagaagtgctatacttttaaatagaaataaagaaaacgtccgctacggacgcttctcggtcgataaacgatctggtaaatcgtttatcgattccagatgttacaccatctgaaaacttcgcgaaaagacgccgataggacgttttttacaagaggggtgcttcatgtctaacacttagttagattatagcacaagccaaaagatatttcaaggcttttcagatgcttgtctggagagccttttttatttctgagtttgaaccttgacaatcgaacgaacccgcagacgagaatacccggcgcaaatcagtgtgcatttgcacgcctctgcaatgggaaatacttggtatacaggattggacaaacctaatctgcctcaggaacaacgtttgaaaacgggtcactaaaatcaggattattaaaacgaataatctttgttttaatcgatgtgcatagctactatccagctatgcacatacattagaacaaagtttggtggaaacgcgcgggctcgaaccgcggacctcctgcgtgtgaagcaggcactctaaccagctgagctacgcttccatatcaactgtatgatgtattctaccacagaaaatgggatttgtcaaacgctaatttggggatgacgtgatttttgcggagggatttacagaaagtttcagtaaactttcctttttccgacactgtatttaacgcgggggcagtatactgaaaacacagaatacacggggaacgccgcaagtgggctgaaatgcggcggagaagcttgcctttatgtgggttttatcggtggttagttattgaaactatacaaaccgaagtgagttttcatggattattgttagaaattagctaaaaacccttgaacttttttcttgttgtggtattattagtataaacattggtgcagagcgtcttttattaaaaattgaacggcacggaaaataggaaaataagacgctgtgcggcaaaaaattcggacggactgcgggtgcaaaaatgagaatggcatgcaccgccggcgtttgccgggatgttccgaatggaaaggacaggacgtatgagtgagatgataaacaaaacggcgccggaaggcaatgttccgctttatttgttccgcagcggcaaaaacagccattcctacgaatacatgggtgtgcacaacacggtgaaggacgggaaggcatgcaccgtgtgccgcgtatgggcgccgaacgcgcaggcagttgccattaccggtgatttctgtgaatgggatccggaaaagtatccgcttacaaagatcgacaacgcggtttgggagggctatacggacgaacccttaaaggaatttgacgcgtataagctcgtcattacggcggaggacggcacggtgacgtacaaggccgacccgtatgcgttccacgcggagacgcgtccgggcacggcttcccgctactacgacatttcggggtacaagtggaacgacggccgctggtttgagcacaagaaaaaatacccgcattataaccagccggtgaacatctacgagatgcacgcaggctcctggcgcaaatatgcggacggcagtgtgttctcttacgacaagctcggtgacgagctgatcccgtatgtgcaggaaatgggctttacgcacattgagttgatgccgttgacggagtacccgttcgacgcttcctggggctatcaggtgacgggctactttgcgccgacctcccgctacggcacgccgaaggactttatgcgctttatcgaccgctgccaccaagcgggcatcggcgtgattatggactgggtgccgggacacttcccgcgcgacgaggccggccttgcgaaatttgacggcatgccgtgctatgaatatgcagacccgagaaagggcgagcacaaagagtggggcacgctggtatttgactacggccgcacggaagtcatcagctttttgatgagcagcgcgctgttctgggtgaaggaataccacattgacggcttgcgcgtggacgctgtggcctcaatgctgtaccttgactacaatcgcaaggacggcgagtggatcccgaataagaacggcggcaaggaaaacctggaggccattgcgttcttacaaagactgaacgaggcgattttcgccgaggtgccggaggtcatgatgattgccgaagaaagcaccgcgtggccgatggtgacgaagccgacttacatgggcggtctcggattcaattataaatggaacatgggctggatgaacgacatgttgcgctacatgtctttggatccgctatttagaaagggcaaccacaacagcctgacgttctcgttcttctatgcgttctccgagaatttcattttgccgatctcgcacgatgaggtcgtttacggcaagggttctctctataataagatgccgggcacgccggaggaaaaggctgcaggcgtacgctgctttgcgacctacatgatggcacacccgggcaaaaaattgcagtttatgggcacggagttctcgcagcacgacgagtggaactttaacgaagaactcgagtggaatttgctgcaataccctgagcaccagatggcgcagacgttctttaaaaagctcaacgcgttctacctcggtcgttccgagctgtgggagatcgatttctcgtgggagggcttctcgtggatctcgaacgacgacgacagccaaagcgtcattgcgttccgccgctttgaccgcgagggcaacgagctgattgccgtgtgcaatttcctgccggtccgccgcgagaattactgcatcggcgtgccgtacgcgggcgtttacgaagaggtgtttacttccgacgctgcggagtttggcggcacgggctttacgaacggcagcaacatccgcaccgtggatgaagcgatgcacggctttgagcagagcatttcgctgacgctgccggagaacacggtattcttcctgcgctgcaagcgtaaggcggcaaagaagcccgctgcgaagacgacaaagacgacggcaaagaagcccgcagccaaaaagcccgcggccaaaaaggcggccggcacaaaagccgcaaagaaaaaaacctgattcattttacatgaaacaatatacgggcggcggcaaaatgccggaacgcccgaaatctaccagagaggggatcatcagtcatgttacctaagcaagaagtagttgcaatgctgctggcaggcggccgtggcagccgtctcggtgttcttaccaagaacctcgcaaagccggctgttccgtttggaggcaagtaccgtattatcgactttccgctttccaactgtgtgaactccggcattgagaccgtgggtgttctgacacagtatcagccgctcgagctgaacgaatacatcggttccggccagccgtgggatctcgacagtatgaatgccggcgtacatattttgcagccgtacgagcagagcagcggctctgactggtacaagggcacggcaaatgccatttaccagaatataccgtttattgagcgctacaacccggattacgtggttgtgctgagcggcgaccacatctacaagatggattactccaagatgattgcgtatcacaaggagcacgatgcggcctgcaccatcgccgtttacgaagtgccgatggaggaggcttcccgcttcggtattctgaacacgaacccggacggctctatttacgaatttgacgagaagccggctgtgccgaagagcaacaaggcttccatgggcatttacgtcttctcctggaagaagctgcgcgcgtatctggaagcggacgagaaggacccgaactcctcgaatgacttcggtaaggatgtgctgcccaccatgctgaacgcaggtgagcgtatgtttgcgtaccgctttgagggctactggaaggacgtcggcacgattgacagcctgtgggaatccaatatggaccttttgaacccgaaggccggtcttgacctttcccgcgaagactggaaaatttattccagaaacccggtcatgccgccgcattacattgcaaagggcgcaaaggtgcagaactcactcgtagcagagggctgcaacgtatacggcgatcttgagttctccgtattgttccacggtgtttatgtggcgccgaccgcgactgtgacggactccatcgtgatgccgggcgctgtgattgaagaaggtgcgaaggtgcagtatgcgatcgtggcggagaacgccgtcatcggcaagaactgcgtcatcggtaaacgcccggaggacatggaaaacagagacgattggggcgtggcggtcgtaggcccggactgcaagctctctgatggcaccgttgtggcgccgaaggaaatgatcgataaggaggcgcaggcataatgtttggaaataatgttttgggcatcatctttgcctatgcacacgaagaaagagtacgcgacctgacggagctgcgcgtgatggcttccgtgccgttcggcggccgttaccgtttggttgacttcaccctctccaacatggtgaactccggcctcaacaaggtcggcatcatcacggaggataactaccagtccttgatggaccacctcggttccggcaaggcatgggacctttcgagaaagcgcgagggtctgtacctgctgccgccgttcggcaaatcgacttcgagaaccgacggcaagatcgaatcgctcgattccattcgccgcttcctgaaaaattcccttgaggaatatgtgattctctccgattgcgatatggtctgcaatatcgattaccgcgaggcactggagcagcatatgcgccagaacgcggacattacggtcatttaccgccatggcacttcgccggacgtagaccgcaacaacatctatatggtagaccccgagaaccgcattcgcgagctgcttctgcaccgcggaagcgagcacggtgtaaattacggcatcggcatgtatatccttagccgcgagctgctgcttcagctcgttgaaggatgcatgagccgcaacgaatatgactttgataaagatatggttcagcgcgtaattcccgaactgcgcgtgatgggttatgaatttaagggcattgcatatcaaatttcctcgtttgaagcgtactttaacgctaacatgggtttgatggatccgcgcgtgcgcgcagaactgttcaatccgaaccgcccaatctacacgaaggtgcgcgatgatatgccggcgaaatacggtttgaattcgtatgccaccaactgtcttgttgcagacggctgcgtgatagacggtgaagtggaaaattgtgtgctgttccgcggcgtgaagatcggcaaaggcgcgaaggttcgcaactgcgttatcatgcaggacacggtcatcggcgcgaacagtcggctcgattatgttgtggcggacaagaacgtggagattgaagagaaccgcacgctgatgggctatcagacctacccggtgtacattgcaaaggaaagcaaggtctaatctgccccgaaaaacgaaggaaaggaaagcggtgtaattgatatgaaagttttgttttgtgccagtgaagcgttgccttttgccgcaacgggcggccttgcagacgtagcgggttctttgccgcaggcgctgcgcgcacgtctgattggctgccgcgtggtgatgccgctgtatgaaagcgtgccgcaggaattgcgcgacaacatgaagtttttaacaagcatcagtgtgccggtggcttggcgtcgccagtattgcggtatttttgaggcgaaggtaggcaatgtcatttactaccttatcgataaccagtactactttaagcgccaaggactttacggtcactttgacgacgcggagcgctttgcgttcttctcccgtgccgttttggagatgctgccgtacattgaatttaagcctgatgtgatccacgcgaacgactggcagacggcgctggtgccgatctactaccgtttgttctatgcaaacaacgactggtacagcggcattaagacgctgttcaccattcacaatatccagtatcagggccagtacggctttgagattctggaagacgttttcggtattccgaagagcgagcagagcttactcgaatacaacgactgcgtgaacctgatgaagggcgcgattgagagcgcgaactgggtctctaccgtgagcccgacgtacgcgaaggaaatcctcgacccgtggttcgcccacaagctggacccgattttgcgcgagcgtgcctggaagctttccggcattttgaacggcattgacgtggtgggctatgacccggcgacggacaagaacctgtatgagacatatgacgcaaagcacctggagggcaaagccgtcaacaaggcaaagctgcaggagcgcctcggccttgccgttgacccggatgtgccgctcatcggtatggtaacgcgccttgtctctcacaagggccttgaccttgtaaagggcggcgtggacaacatcatgacgtactcgaatgcgcagtttgtggtccttggcagcggcgactgggagtatgagcagttctttaaagagatgcaggcgaagtatccgggcagatttgtgctgtgccagggctttgtgccggagcttgcgcgcaagatctacggcggctccgatattttcctgatgccgagcaagagcgagccgtgcggtctttcacagatggtggcgctgcgctacggttccattccggtcgtacgcgaaacgggcggcctgaaggactccattacggacagcggcgacggcaagggcaacggcttcacgttccagacgtatgacacgcaggatatgctgaactccgtgcaccgcgcgatctacgcgtataacgagagcaaggacggctggaaggtgcttgtggagcgcgcaatggcgtgcgacaacagctggggccgctccgcaaacgattacattcgtttgtataagcagctcatcaacagctgatcttctaaaacgtctttcgagaaacaagacggcgttttgtacgaccgtttgattaggtattgtagaaaatgaaaaatgccctgcttgtgtttttaagcacaggcagggcatttttgcgtttttatgttttggttatttctcttccgggtaacggacggggacaaactttgcgcggttcatgagagggtgctcgaggcggatggcaccgtcgtgcgggcacgccatgacgcatgcgccgcagtagtagcactcgccggggtagagcacgatggggtgcttgcctttttcgggcgaggggatgaggatatccacctgacagatgttgacgcaggcgttgcagccgacgcattttgtttcatcgtaaagaatcgggtgtgtgctgcacggcacgggttctgccgtgagaattttgttttgaagctcgctcatttccgatacgcccccttctgctcggttctgatgtaatccccgttgcgcttttcgtactcggtctcgaggtcgccgaaatagtagagcggatggctgtcgtagatgacttcgccgttttcttgtcggacggtgatgaagcggcagtcgcgctcggggtcggtctcggtgctgtccgtgcgcttgaaaaacagcggctcggacgacgttttgcgggagaggcaggcgtgcaaaattaacttggagacggtcaaaatatcaaagacctcgtgcgcgcgcatgagctcgtgcgggtttttgcagctgatctgcgggacgatctcggtttcaaagctttcgagcaggtcgagaccctcatgcaaaagcgcatcgcactttacgccgccgcagtagttctgcatggctttggagatggccatgttgagttcgcgccaatccatgccgtcttcgcggcggatgggggcgagcaggcgttcacgctcggctgcggcttccgcttcattatagtcgggcagggtattgagtgctttggcagctgcggcggctttgcggccggcgtagtagcccgtggcgcaggcgaaaccggcgcagtccgaagcgtagagctggtcgccggcggcgtagatgccgtcgatgtttgttttgaggtcccaatcgtgccaaatgccgcccggcgcgccgaacagctgccgttcctgctcgagaaagtttgcggactgccagcccgtgccatagctttgcagcatgtgcttttgggggtcaaagccgcgctctgtgtaatttttgaggatcggaatttttgttttgccctcttcgccgaccatcatgccccagatgacgcggcgctccgcgtcgggcatacggctgaggtctgcgtagaacggcagctggtagccgcggcgcatgagctcttcaaaatcgagcgtttcggggccgcggtactcgtacttcgggttatcgatgacgccgccctttaagaaaaatttctgaccgggagcggggtagtagcgctcggagacggttttaagctcattgccgtcgcggtcgacgtaggggatttccacgccgcgggcgtcgaccatcgttgcggcataccacgtgttgtggttattgcctgcgccgtagggcggaaagctgcggccggcggcggagaactcgcccttgacggatttttccatcatggtgaactcgatgccggccttgtagcccatggcgtggccactgccgatgctctgcatagggcggaactcgcacaggccggtcatatccgggttaaaaagccagacgcgcgccgggcggctcatggtgagaatggtctctttggcgcggaggatgtagaacttgccggtgcgcacgtccatggcgcaggcgcccgcgccatgctttttgccgttccgggcggtggtgagcaatgcggtggcttcggtgcggtcaagcactttcacgccgaggcgcagaagctccttgaaaagagcgggcttaaaggtgctgccccagacgcgcagagtgaatttgtttttataatcgtaggcgaacatcagcttcgtttcgtcatcgcggaactctgcgcccttgaattcatcgtcggtgtcgcggactttgccgccgaacgactcaaggtctaacagacggtcgtagccctcgcggcactcgatgtagtgcgcgatgccgttagagtagccgcactgctcatcgacgtacgcttcggcgatttccttcggcgtgacggtggagcaggggttcgtacaggcggattcccaatggtcgaaaccggtgcctgcgctgccgctgcgggcggtggcacctttttccactaagatgacggactgtccgcgccgtgccgccgcgatggcggcatagcagccggcaaggccgccgccgagcaccaaaacgtcgcaggaaagcatttcggtgatgtctaattcatttttatatggccagttataggtctgcaaagcagatccctccttgtttgagtgtgaaaagcggagcttcagcaaagctttaggcggtgtgcgtctttttatgctttgcgtgcctgtatgcgagcaggcagatgatgctgcccagtaccacgagcgccaggatcatcaaagcgcagtgcatgaaaaaggtatcgggcaaaatggtgatgacggggtctgttgcggcatcgaagatccaatagttgttatggaagacaatcttatggaataggacgaacaccgtttcccagtttaaggcgatgagtacaccgagcgctgcgggaatggcgaccgttaaaatgccggaaagcagcagataccccgggttctttttaaaatggcggtagatgatgcccgcaaggctcaaaatgccgctgacgatgagcgtgatctcgaagacgccgaacacgtttttgacttcttcaaaatggatgcggccgctctcgctcatggcgagcgtggggaaattcagaacttttgtgccgaaaatggagttgtaatcgatgagcacgttgtagttctgcaaaatttcctcgcgcggcaggccggacatggcggtgatgtttaaatggtcaacgtcaaaataatagagcggacggaaattgagcgtgaagacgacagcggcgctgataatgaacagcacgagcgcgacggcgagcacgatattgaaaacgaccgccaacggggatttttgaagtttatcagacacgggaaatacctccgaattttttatcttgcaaaggcagacccgcacggtgctttctgcggggacatgccctccgggatgggcttttctaatttttttgtggagacaaacgtcatacggtgtccctccttttttgaatttataggaaacatggtagcacaatccctgcaaaatcgcaaggaaaacgcgcaaaaagactatttgataacgcgatacttgccgaagcgctgtccgtttggcgtaaagcagatgacgcgcatgacggagattaaggattgcttcggtgaatgcgtttaaaaacaggatagatatgagaaaaccgccgcataccgaaatttctccggtatgcggcggttttgtgctttttatgattctttgacgagcacatcgatgacttctgcgatgtacatttcgtggtagtccttgttcgggtaccagcgtccgtctacggtttcgtcgaggaactgctcgggtcttaacggcgtgcggctcattttgcggcagacgagcacgagctccgcttcttcaaaatacgcattgccgtttgtgaacgccggggtgaagccgacttttttgaccttgtcttcatcacggccggaaactttaccgaggtaggagagtgcgtcttttttctctgcggggtagaacgagagcgtgaaagtatcgcgggtatcgacaaactctttcgtgtagcgctgcgggcggatatacacggtgacggacggcttgccccacatgaagcccatggcgccccaggagacggtcatggtgttgaatccgttttcatcgccggcggtgagcagggcccactctttgccgatttttgtgaacgggtttaaagacagggagtcatacggtacggaacgaaatgccatttaaaacagtcctttcggaaaagatttacagaagtcaggcgatctgcttttgcggaccgcggttaataacgcgtttgatggtgagtgcgtagaccaaaatggagacgagcggcggtaaaatatccgagatgggctcgcagaagaagatctgctcgatgggcaggaagcgcggcaggatgaaaatgcacgcaaagaagatgaccttgcgaaagaccgaaagcggcagcgcgattttgacgacgcccatgcccgtaaagccgtccacaatctcgtactgcatgccaagcaacacggtgccgagcgtgtaaatacggatgagccgcgccgtcatggcaatgtattcgggttctttggtgaaaatgcctgcaaagagatgcgggatggtctgcgcggcgagcgtcatgaggacgcaaaagctgaccgcgatgacgaagatgtaccgctgcgcgcgaaggattttctccggacggcgtgcgcctaaattgtagcctaaaatggtctgtgtgcccatggtgaggccgccgagcggcatggtgatgagcagctcgaagctttgcacgatggtgttgcaggtgaggagcatgtcgctgttgtcgccgccgtagcgctgaagcatcatgttgagcgagatgagcatgacgttatcgaaaagaataatgagaaacgcgctcatgccgatgctcgtcacacggccgatgacttttaaatcgtatccgccaaatgtgatgggaacttcgatatgtttgccgaacaggacgcacagcacaaacgcacagcttgcaacctgcgaaatgaccgtggcgatggccgcgcccgcgacgcccatatggagagcgaagataaaaatggggtcgagcacaatgttgatgatggcgccgattaaaacggagaacatgccgctgcggctgtggccctgtgtgatgataaactggttcatgcctgtggcggtgagggcgaagaccgtgccgataagatagagcgaaaagtaggtctcggcgtaggggtaaacggcctcggtcgcgccaaacgtgagcaaaatggggcagcggaagatataggccagcaccgtgacgggcacagcgagggtcaaaatgtacacgaagcagtttgcgatgacttttttagcggcgtctatgttcttttcgccaaggttgatgctgacaagcggcgcaccgccgatgccgacgagaaacgcaaacgacgagatgagcgtgacgatggggccgcacacgccgacgcccgcgagcgcctgcgtgccgttgctcggaatattgccgatgtacatacggtctacaatgctgtacagtacgctgacgagctgcgagagcatggagggaacggccaaggtccagacgaggcctttaatgttatccgacccgaggtcgtttgtgaacttcaaggaaaagcgcctcctcagtgctcgtgacagacttgaaaaatatagaacttgaggtaataggattcgtcggcactccacaaaatgggatgatccggcgactgggtgcggaactccacctgacgcaggcggcagtgcgcggcacgcgcggcctgcccaatggtctgggcgaaaagctcggcgttcatgtagtgcgagcaggagcaggtggcaaggtagccgccgtccttgacgagcttcatgccgcgcaggttaatctcgcggtagcccttgacggcgtttttaatggcgtttttggattttgtgaacgccgggggatcgagaatgacgacgtcgaactgcttgccttcgttttcgagcgcggggagcaggtcaaaaacgtcggcgcacttgaactcgaccgtatcggaaagatgatttagagcggcgtttttctgcgcctgcgcgacggcgagctcggacgcgtctacaccaaggacgtgctttgcgcccgcgatgccggcgttcagcgcgaaggagcccgtgtgtgtgaagcaatcgagcacatccatatccttgcagatgcgctgcatggcgagacggttatatttttggtcgaggaaaaagccggtcttctggccgtctttaacgtccacgatgtagcgcacgccgttttcgacgatctcgacatcggtgtcgaattcgtcgccgatgaagccctttttgcggtccatgccttcttttaatcgctctttggcgtcgctgcgctcgtacacgccgcgaattttgatgccgtcttcgagcaggactttctttaagatgtcaacgatctgcagcttcattttatcgatgccgagcgcgagggactcgacgacgaggacatcggagaatttatcgatgacaaggccgggtaggaaatccgcttcgccgaaaatgacgcggcaggcggaggtatcgaccgtgcgcttgcggtatgcccaggcgttgcgcacgcgcatctcgaggaacgcgtcgtcaatctcctgtgacgcgtcgcgggtgagcatgcggacgcggatcttggagttctggttgatgaagccgcggccgagcgggcagccgttttgctcctgcacggtgacgacggcgccgtttttgaacgtgccgtggatgctttcgatctcgttgtcatagatccaaagaccgcccgctttgaaagcgcggccttcgccttttttgagtgttacaatcgtttcattcatagatgggttccttttatatagttgagatggggaagctttttctaaaggcttgcagggcaagcctttcaagggatccctaattgagtccctcgcggttcaactgtccaccggacagttgaacctattctcctgatttttgggtaggcaaaagggtttcgtcgtctgcggacgacgaccaaaggtttcacctttggaatccgaccgactttttgaaaaaagttggatcaaaaacttttaaccaacgctttcggagagattggcgttcgctttttccgcttcgatctgctttgtgactttcttaatgcagtgcaggcaggtgggggtgatgtagagcacggcggcgatccacgcggtttgatccgagaaacagatagccgtatagccgaacgcgccgacaaagccgaggctgacgatggagcgcgcgaacatttccgttacgccggagaataccgcgcggccggagaagccgatgccctgtgtcgccatacggcagatgttgaggatgccgagactccagaagaagtagcccatgcagcgcagatattttgcggaagcgtcgagcacgtcgcctgcactcgattcaacaaagagcgtggacatgctgcggccgaagaagatcatgacaaggccgatgcagaagccgtaggcgacgccgacgatgacgccgagccgtacgccctgccgaatgcgctccggcttttttgcaccgagattctgaccgcagaagacggaaacagcagagccgagggcatcaaacgggcacatgcagaactgcttcaggcgcatgccggccgtgaagcccgaaacgtacacgctgccgagaccgttgttcgctgcctgcatgaccatgctgccgatggctgtgatggaggtttgaagccccatggggatgcccatgacgacgaggtcacggatggattccgcatccgctttgcagtctgcgcgggaaagcgtgaggagcggcacgcggaagcggatatagatgaggcacaaaatgccgctgaccgcctgcgctgcgatggtggcgatagccgcgcccgcaacgccccacttgaagacaatgatgcagagcaggtcaagaccgatattcaggacggtcgagatggcgaggaacaggaacggcgtgcggctgtcaccgacggagcgcaggatgctggagagcagattgtataataaggtaaaggggatgccgaggaaaatgacgatgagatacgcgtaggcgtcgtcaaaaacatcctgcggcacagagagcatttgcaaaatgagcgtgcagcacagtgaacataccgccgtgatgagcaccgcgaataaggcggtaagcagcacggagttgaaaatgtacgaacgcattttatcaagacgctctgcgccgaagcttttggcgatggggataccgaagccgatgcagatgccgatgcagaaaccgagtaccagaaactgcacgctgcttgtagcgccgacggcggcgagtgcgccggtgccgagcacacggccgacgatggcggcatcaaccagattatacatttgctgcaagaggttgccgaacaaaagcggaaccgcaaattgcagaataagcttgaggggcttaccctctgtcatactttttgtcacgaaaatcacccgataatacatagtctcttttcaaccttcttattttatcataccttttttattttggctatggcagaactgcggattttgcacgttgttttccacactttttgcgtgaattgcggaaaaagcgcccgatttgcgaaaaaaggaaaaaacgatgggagaaaaggtgtttcctgcaaaacttacaaaagaaaaattttgacaaggcggtcgaaaagcattgacaacggggaaagcgggtgttataatctattcaatttcataacaaaaagcgatgacgaagactgtctgtgcagagctgtttcagagagccggtggaaggtgtgaaccggtgcagagatgcagagatttctcccttccgagccggatgcctgaacagcgaattcagtagggtatcccgtgattgctacgtcagtgcatagaagttattggacttcgaagagtggcggaggttctccgcaatttgagtggtaccgcgagtgcataatttagttattacacccgtctcaaagcataaacggctttgaggcggtttttttacacttcaaagcggaagaacaaggaaacaagctgcaagtttgaaagcacaaactttcaaattcataaggctttaaaccgaacacagcaggaaaggcagaagaacatgttatcattagacaaagtatttgatgcgcaaaccgttctaaagagcatcatccgcgaaacaaacgtcgtgaagacctacggcatcgcgccggattgcgacctgtacctaaagcccgagaatttgcagatcaccggctcttttaaggtgcgcggatctgcgtataagatctcccagctttccgcagaagagaaagcgaaaggcgttattgcctgttccgcgggcaaccacgcacagggcgtggcgctagcggcaacgaaaaacggcatcaaatcgctcatctgtctgccggactccgcaccgatctccaaggtggaggccacaaagggctacggcgcagaggtttgccttgtggagggcgtttacgacgacgcgtataacaaggcgattgaattgaaagaaaaagagggctatacgttcgtgcacccgtttgacgacgaagatgttatcgcgggccaaggcaccatcgcgctggaggttctgaatgaccttgacaacatcgatgccattgtggtgccggtgggcggcggcggactcatctccggcattgcgtacaccgcaaagcacatccgcccgagcgtgaaggtgtacggcgtacagatgaccggcgcaccgagcatgtacaactccattcacgacggcaagatcgagacactcgacaccgtgcagaccgtggcggacggcatcgccgtaaagcgcccgggtgacaacacgtttgagatcgtcaaaaaatatgtggatgacatcgcgctggtgagcgaggacgaagtttcgagcgcaatcttggcactcatcgaaaagcagaaaatgatcgcggagggcgcgggcgctgcttccgttgccgccgtgatgttcaataaatttgatttaaagggcaagcgcgttgtgtgcatcgtctccggcggcaacatcgacgtgacgagcctttcccgcgtgattgaccgcggcctgatgaactccggccgttccgcgagcctcctcattgagcttatcgacaagcccggtcagctcaaggagatctcttcgatcatcgcggactgcggcggcaacgtgaccggcgtgcactatgaaaagggcaacaccgaaagcattaacggctgcttcctgcgcatcgaaatggagacgcgcgacaacaaccatgtgaaaacgatcaaaaacgccctgcgtgaagcaggcttcagaaccaccaagggttgagaggagaaagcaaaatgatggacgcaagcaaatataaggtcgggtacttcccggtatcgaaagaatataacaagtgggtggaaaaagaccacattgaaaaggcgccgatctggtgcagcgtggatatgcgcgacggcaaccagagccttgtcatcccgatgagccttgaagaaaaacttgaatactacaaagtgcttttgcaggtcggctttaaggagatcgaggtcggcttcccggcggcgagcgagacggaatatgagttcctccgcacgctgattgacaacaacatgattcccgaggacgttaccgtgcaggtgctcacccagtgccgcgagcacatcatccgtaagacattcgacgcgtgcaagggcgcaccgagcgcgattatccacttctataactcggtcagcgttgcacagcgcgagcaggtgtttaagaagtccaaggaggagatcaagaagatcgccgtagacggcgcgaagctcgtcaaaaagcttgcggccgaatacgaaggcaacttccgctttgagtattctccggagtcctttacgggcaccgagccggaatacgcgctggaggtctgcaatgcggttctcgacgttctggagccgagcgagacgaacaacgttatcatcaatctgccggtcacggtggaaatgagtatgccgcacgtgtatgcttcgcaggtcgagtacatgagcgagaacctcaagtaccgtgaattcgtgactttgtctttgcacccgcacaacgaccgcggcacgggtgttgcggacaccgagttggcgctccttgccggcgcagaccgcgtagagggtacgctgttcggcaacggtgaacgtaccggcaacgtggatatcattacgcttgcgatgaacatgtactcccacggtgttgacccgaagcttgacttctccgacatgccgtaccttgtggacgaatatgaaaaatgcacgcgtatgcatgtgtacgaaagagccccgtatgcgggcgcactggtgtttgcggcgttttccggcagccaccaggatgcgattgcaaagggcatgaaatacagagcgaaaaataagctgcatcagtggaacgtaccgtacattccgatcgacccgaaggacatcggcagaacgtacgacgcagacgttatccgtgtcaactcccagtccggaaagggcggcatcggttatctgctggagcagacgtacggctataacctgccgccaaaaatgcgcgagcacttcagctatctgtgcaaggatatttccgaccacgaacacaaggaactgaagccggatgaggttctaaatatctttgaagaaaactacctcaatctgacgaacggtgttaccgtgacggattttgagtttatgcgcgacaaggacaacgtgaagatcggcatcacgttcgcgaaggacggcgaagagaccgagatggaagcggaaggcaacggttccctcaacgcaatcaacaacgcgctgcgtgcgtacaccggtgcagagtacaccctgcaggtctttacccagcacagtatgcagggacagggctcgcagagcgtggcggcttcgtacatcggccttgaaaaggaagacggttcgatgttctggggcgcaggcaccgacaccgacgttgtaaaggcgaatacaaaggcgctgttgagcgcttacaacaatatgatcaaagggggaaactaaaatgaaaatgaccatgacgcagaagatccttgcggcgcacgcgggtctccgtgaagttaccgccggtcagctcatcaatgcaaagctggatatcgtgctcggcaacgacatcacgacgccggtcgcaattcatgagtttaagaaagcgggctttacagacgttttcgataaggacagagtaacgatcgtactcgaccactttgtgccgaacaaggatattaaggcggcggagcagagcaagacgtgccgcgagtttgcgtgcagccactgcgtgagccacttctatgacgtgggcaagatgggcattgagcatgcgcttttgccggagcagggcattgtgaccgccggcgactgcatcatcggcgcggacagccacacttgtacctacggtgcgctgggcgcgttctccacaggcgttggctctacggatatggcagccggcatggcaacgggcatggcgtggtttaaggttccgtccgcgatcaaatttaacctgaccggcaagctgccggaaaattgcagcggcaaagacgttatcctcacaatcatcggcatgatcggcgtggacggcgcgctgtataagagcatggagttcaccggcgagggcgtgaagaacctctccatggacgaccgcctgtgcatctgcaatatggcgattgaggccggtgcgaaaaacggtattttcccggtggacgatattacgcttgcctatttacaggatagaagcgaacgcgagccggttgtatacgaagcagaccccgacgcggaatacgaaaaggttatcgatatcgatctcgcaaagattgtgccgaccgtcgcctgtccgcatctgccggagaacacgcacccggcaagcgagctgcacgatattaaggtcgaccaggtcgtcatcggcagctgcacgaacggcagaatggaagacatggaagcggcgtacagcattttgaacggcaagaagattgcggacggcatccgctgcattatcattccgggcacgatgcagatctaccgcgaatgcgtggagcgcggctacgtgacggcatttatcgacgcgggcgctgttgtttctaccccgacgtgcggtccgtgcctcggcggctatatgggcattctggcagcgggcgaacgctgcatcgccacaacgaaccgcaacttcgtcggccgcatgggtcatgtggacagcgaagtgtacctggcttctccgcacacggcggcagccagcgcgctgaccggctacatcaccgaatataaggaggcgtaagcatgaacacacagggcaaggttttcaaatatcccgataacgtcgatacggatgttatcattcccgcacgttacctcaacaccccgaacgcacaggagcttgcgctccactgcatggaggatattgacaaggcgttcgtaaagaaggtcgaaaagggcgacgtcattgtggcgggctggaacttcggctgcggctcttcccgtgagcacgcaccgctcgtcattaaaacctgcggcacgggttgcgtcattgcaaagagctttgcgcgtattttctaccgcaatgccatcaatatcggcctgccgattctcgagtgcgaggaagcggcggacgagatcaacgcaaacgacgaagtttcggtcgattttgataccggcatcatcaccgacatcacgaccggcaagacgtataaggcacagccgttcccgccgttcattcagaatatcatcaaagcaggcggcttgctgaagtccctcaaggaggcggaaaacaaatgacgaagaacatcgcggtgatccgcggcgacggcatcggaccggagatcgtaaacgaagcgctccgcgtgctggataaaattgcagagctgtacggacacacctttcattatacagacgtcgatatgggcggctgtgccatcgataagtggggcgacccgctgccgcaggaaatgctcgataagtgcgtagcttccgacagtgtgctgctcggcgccgtaggcggcgacaagtggaacgacgtgccgggcccgaagcgcccggaaaagggtctgctgcgcctgcgcgcgggtatgggagtttacagcaacaaccgcccggcaaagatctggccgcagctctctgacgcttctccgctgaaaaaatctattgtcgaaaagggcatcgatttcatcatcgtgcgcgagctcatcggcggcatctattttggcgagcataagaccgatgatgcagacggccagccggtcgcgacggacattatgaagtacagtgaagcggagatcgagcgcatcggccgcatcggattcgagacggcaagaaagcgcaatcaccgtttgtgctccgtagaaaagagcaatgtgctcgatacgagccgcctttggaagaaggtcatgcaccgcttggcggaagaatacaccgacgtggagctgaccgatatgctcgtcgataactgcgcgatgcagatcgtgaagaacccggcacagttcgacgtcatcgtgacggagaacatgttcggtgacattctttccgacgaagcttccatgatcaccggctccatcggcatgatcccgtcctcgagcctcggtgcaacgagctgcggcctgtacgagccgatccacggctctgcaccggacattgcgggtcaggaccttgcaaacccgatcggcaccattctttccgccgccatgatgctgcgttacagcttcgatatggcgaaggaagccgatgcggtggagcatgcggtttccaagtaccttgacgcgggttaccgtactgccgacattatggaagacggcatgacgaaggttggctgcaaaaagtgcggcgacctcatccttgaatacttaacgaaggagtaattgaatgcagcttacaggtgcagatatcctcatcagaactttaattgaacagggctgcgacaccgttttcggttatccgggcgggcagatcctgaacgtttacgacagtctttataaatatcagaatgaaattcgccacatgctgacggcgcacgagcagggcgctgcccacgcggcggacggctacgcaagagcgaccggcaaggtgggcgtggtgatgtccacctccggcccgggcgcaacgaaccttgtgaccggtattgcgacggcgtacctcgattccatcccgcttgtcgcgatttgcggcaacgtgccgacaacacagatcggcacggacagcttccaggagatcgacattacgggcgtgacgctgcccattacgaagcacaactacttcgtcggctccgtggagaatctggcggacaccatccgcgaggcgtttgcgcttgcgcagtccggcagaccgggcccggtgctcatcgatgtgccgaaggacgtgcagacagcggtctgcgactacgagccgcaggcacccgtacagcccgaagaacgccacgcggcgaaggacgtgcgcatcaaagaagccgcggcgctcatcaatgtctcgaagcgcccgttcatttacttcggcggcggtctcatcacatcggaagcgcaggaagaaatgctggcgctcgccgagaagattgacgcgccgatcggctgctccttgatgggtctttccggcattccgaccgaccacccgcgtttccttggtatgcagggcatgcacggccactacgcttcttccatggcgatgcacgacgccgacctcatcatttcgctcggcgtgcgctttaacgaccgcgtgacgggcaaccgcgagaagtttgcgaagcttgcgcagatcatccatattgacgtggacggctccgagctctcgaaaaccgtgaactccgcctgcggcctgcgcggcgacgtgaagctgacgctgcaaaagctcattccgctcgtcaacgcagagcagaagcccgactgggaaaaggccgtgaaggccttaaaagaaaccgaaaacgattatctcgatattcgcccgggccttacgccccgcaacgcgatcatgacgctgaacaagcacctcggcgagaataccgccgttgcaacggacgtcggccagcaccagatgtgggcggcgcagaacgtgaactttaaaaagccgcgccgcttcatttccagcggcggcctcggcaccatgggcttcggcctcggtgcggccatcggtgcggcggtcggcacaggcgagcgcagcgtgctcgtcacgggcgacggcagcttcggtatgtgtctcaacgaactcaccactgccgtaacctacaacgtgccggttgtcatccttctgatgaataacggcgtgctcggcatggtgcgtcagtggcagacgctgttctttaataagcactattccaacacgattctcgaccgcaagactgactttgtggcgcttgcgcgcgcgttcggcgcggacggcgaggctgttgataccgtggcggcgctcgacaaggcgtttgagcacgcgttcagctgcgacggcccgtatgtcatcgattgcaggatcgataaggacgaattcgtcctgcccatgctcccgccgggcggcagcatggatgatattatcatgaaggtgggtgaatgagatgaatcgatataccgtagcggttctggtcaataaccagttcggcgtgctgaaccgtgtgacgagcatgttcagaagacgtcagttcaacatcatttctctgaccgtcagcgaaacggaatcgaacgcgctttcccgcatcaccgtcacgtttgagggcggcgagacgcagaagcagcagctcgtgaaccagctttataagctgccggacgtttgctccattaaagagtttaccccggacacctccgtcagctgcgagctgatgctcattaagctgaaaaacgattccaaaacgcgcagtgacatccttgccgcggcggacgcgttcggcgcgaagaccatggattactccaaggattccctgatgctttgcctgacctccgaatcgcgaaaaatcgatgaattcgtcgatttgatgcgcgactacgagatccttgagatctgccgcaccggcaatgtttcccttgaaaagggcagcacgacgatccgtcaggccatcaatttctaatttagtttgtccatttaaattaacataccaattcatgcacagaaagaggtaatttatcatggcaagaattttttatcagcaggattgcgatctgcagaagctcgcaggcaagaccgttgccatcatcggctacggctcgcagggtcacgcacatgcactgaacctgaaggacagcggcgttgacgttatcgtcggtctgtatgaaggctccaagagctgggcaaaggccgaggcacagggcctcaaggtcatgacaagcgctgaggctgcaaaggctgcggacatcatcatgattctcatcaacgatgaaaagcaggctgcactgtacaaagagagcattgagccgaacctgaccgagggcaagaccctggcatttgcacacggctttaacattcacttcggctgcatcaagccgccgaagaacgtcaacgtcatcatgatcgcgccgaagggcccgggtcacacggtcagaagcgagtatcaggcaggcaagggcgtaccgtgcctcatcgcggtcgagcaggatgcaacgggcgacgcttgggacatcggccttgcttatgcactcggtatcggcggcgcaagagcaggcgttttggagaccacgttccgtaccgagaccgagaccgacctcttcggcgagcaggcagttctctgcggcggcgtttgcgctctgatgcaggccggcttcgagacgctggttgaggcaggctacgacccgagaaacgcgtactttgagtgcatccacgagatgaagctcatcgttgacctcatctaccagagcggctttgccggcatgagatactccatctccaacacggcagagtacggcgattacatcaccggcccgaagatcatcaccgaggagacgaagaagaccatgaagaagatcctgaaggacattcaggacggcaccttcgcaaaggacttcctgctcgacatgtcttccgcaggcggccaggtacacttcaacgcaatgcgcaagctggcttccgagcatccgagcgaggctgtgggcgcggatatccgcaagctgtacagctggagcgacgaggataagctcatcaacaactgatttgaacggaatctgttttaaggggatagccataggggagttttcctctatggcttaaaccctatttacacacggcgcgtttttccatgcgggacgccgcgccacagccaaaatttcacggatcgaggaaataaaatgaaaagtgattctctgaaaatcggtacgcagaacgcgccgcaccgtgcgctgtaccatgctctgggcctcacggaggaggagatcgaacgtccgctcgtcggcatcgtcagctcctataacgagatcgtcccgggccacatgaatatcgacaagattgtagacgccgtaaagatcggcgttgcgatggcaggcggcacgccgattgtcttcccggcgatcgcggtatgtgacggtattgcaatgggccacaccggtatgaagtattcgctcgttacgcgcgacctcattgcggattccaccgaagccatggcattggcacacggctttgacgcgctcgtcatggtgccgaactgcgacaagaacgtgccgggccttttaatggcggcggcgcgccttaacgttccgacagtgttcgtcagcggcggcccgatgcttgcgggccacgtagacggcgcaaaaacgagcttctcctccatttcggaggcggtgggcgaattcaacgccggtaagattaccgaagaaaagctgcgcgaatatgagtgcaagacctgcccgacatgcggctcctgctccggcatgtacaccgcaaactccatgaactgcctgacggaagccctcggcatgggtctacgcggcaacggcaccatcccggcggtatattccgcacgtatcgagcttgcaaagcacgcaggcatggcggtcatggatatgctgagaaagaatattcgcccgcgtgacatcatgacgaaggacgccattatgaacgcacttacggtcgatatggcactcggctgctccacgaacagtatgctgcatctgccggccatcgcgcacgagtgcggcatcgagatcaacctcgacatcgcaaaccggatcagcgaaaagaccccgaacctgtgccatctggcaccggcgggcagaacgtacattgaagagcttgacgaagcgggcggcgtgtacgctgtgatgaacgagctgagcaaaaagggtctgctgcacacgaactgcataaccgtgaccggcaagaccgtcggcgagaacatcaagaattgcgtgaacctgaaccacgacgttatccgtcccatcgagaatccgtacagtcagaccggcggcatcgccgtgctgcgcggtaatcttgcgccggagggcagcgttgtaaagcgttctgccgttctgccggagatgcttgtgcatgaaggcccggcacgcgtgtttgagagcgaggaggacgcgcaggcggccatcaacgcgggcaagatcgtaccgggcgacgtcgttgtcatccgctatgagggtccgaagggcggccccggtatgcgcgagatgctgaacccgacctctgctatcatgggcatggggctcggcaacagcgtggcgctcatcacggacggccgtttcagcggcgcaacgcgcggcgcgtgcgtcggccatgtttccccggaagcggcttccggcggccccatcggcgttgtggaggaaggtgacatcatcagcatcaatattccggagaacagaattgaactgaaggtggacgaggctgtcctcaatgaacgcatgaagaactttgtgccgaagaagaaagaactttccggctacctgaagcgctacgcggcgctggtctccagcggtgcttcgggggcgattttgaactgatgggtagtttacaggagttgagcatccgcctttccacgttggcggtgttcagagaattacaggaagatgcggttataaatagtctgcgtaagtatctcgcagagccgtccccggcgctgtatgcgttgttcgtctctgcgctgtaccgcgcaaacggcggcatactcggcgcatatgtgcgcgaaatctgtgaaaacagcgagaacgtctacgtgcaggctgtgggcaaaaaggaagagatccccgcttacctgcgcgaggccgttttggaagagcttaaaacgctgcagatgacggcggagctcacgccggaaacgctgcgcagcgcgatggagtataggggctttttacccggctttgtcagcgaagcgccggacattaaagcgtgctacacagagcgcactgcgaacatcggcaagtacggctacggcatttacgccaaaaaccgtatgttctaccttggcgagaatgccgagatcgtgccggtcagtaacccggacaagacggagctttccgaccttgtggattacgcccgcgagcgccagatcatcatcgataacacaaaggcgctgcttgagggtaaacctgcggcgaacattttgctgacgggcgacgccggtacgggtaaatcgtctacggtgaaagccgtcgtcaatgcgctgtggcgcgagggtttgcgtatcatcgaggtgcgcaaggatcagttacagtctatcccgaaaattctcgatgagctttctgcgaacccgctgaagtttattctgttcatcgacgacctttcgttcctcaaggacgacgataacttcaatgcactgaaagcggtgctggagggctccgttacggcgaagtcgcagaatgtggcaatctacgcgacgagcaaccgtcgtcatatcatcaaggagaagttctccgaccgtgagggcgatgatattcaccgcaacgatacgatgcaggagcttgcatcgctttccgagcgcttcggcatccacgtgacgttcagcaagccgaacaaggacacgttcctgcacatcgtgcgccaccttgcggaggaaaacggcatcgatatgccgacgcaggaactggagctgctcgccgagcgctttgcgctggagcgtggcaaccgctccgcgagacttgcccgtcagttcatcgacggactgctttccaaggcggaataaaaaccttatacagcagactgtttttgaagcggcacctttgccgttaaaacacgaaatgaaaaatgctcccggtttttagctggttgctcataaaaaagtgaatccgacctatggctgcaatcaaaggtcggattctttttttatgttagggctagaatatccatggctccctctgacgcgggaggcttggatgcggtgcaaaatcgcacattaccgcactacaccgaatggtgtatagaagtgcgcccttactgtttgacaaattggaattgattttcctttttatttcttagtatcaatccaaatgaaaactctctcgtcagttctttcagtaacaacacctccgtttgctattgccacagcttgagatgctatgttatctaaaagaatggttactaacactttatctattcccattcctttcgcttcattaagcaataatctcagcagttcttttccatatccttttccacgaaacgctggtgcaattccgtacccgatatttcctcctgcttttctcaatgcctcagtcaaaaaatgtctgacagaaccaaatccaaccggaataccatcagcatatagccaaaaagttgtagaaggcactttccaaccatctacaatcccttcttgctcagaatccctctgttttacaatcaaccattctttatactcatcaaatgttaatccgttggctttgttaattaatccattttcttcagcagggatctcttgcagcattgtgtaaatatctaagccatcatcaactgacaatctttttaattccaacattattttcaattctccttaatcaaataaactcaagtttatcagtctgtttaatcatatcatatggcttcaatgtacggcaagaacaatcccggcagacattactgccgggattgatgctgttttatggacatctacatttatgccgggagcgtttttgtgtatacaggtaaatttgattttacaaattgctgtggcggcggctcgaacccgtttgcagggtactgccgagactggtgatgcaaaggagtgttgcgatgaggaacacgccgggaatgacgataatccaccacgcgtttgtgagcagagccttttcgccgacagaaacgcattacgcttcgtattcgccgcggatgtcgtctttcggggcgggaatggggtagttacccgtaaagcagcccgtgcagatgccgaggccgttcaccatttccggcagacgctctaaacgtaaataaccgagcgtatctgcgccgatctccttgcagatctcgtcgaccgtgtgattataggcgataagctggtggcgctccggcacatcgatgccgaagtaacacggccacaggaacgggggcgagctgatgcgcatgtgcacctcttttgcgcctgcgtctttcagcatgttcacaatctggtcgctcgtcgtgccgcgcacgatggagtcatcgatgaggatgacgcgcttatccttgacaacctcgcgcaggacatttaatttaacgcgcacgctggattcacggctgctctgcttcggtttgatgaatgtgcggccgacgtagttgtttttcacgaatgccgtgccgtaggggatgccggattccatggcgtagccctgtgctgccgcgttgccggattccggcacgccgacgacgatgtccgcatccacgggggaatctttcgcgaggaaacggccggcaagcagacgtgcggaatacacgttgatgccgtcaatgcggctgtccgggcgggcgaaataaatgtactcaaaaatgcagcgtccctgcttttcggcgggaaggcagtgcgatttgtcggagagaatgccgttcggcgtgatggtgacaatctcgcccggctctacgtcgcggacgaattccgcgcccacggcgtcaagcgcacaggtctcgctggagaggaaatacgtgttgtcgcgcttgccgatacataggggcttgaagccatagggatcgcgcgcgccgatcaacttgcggggggacatgaccgcgagggcataggcaccctcaattttgtccatcgtgcggctgacggcctcctgcacgtttttcgtctgcacgcgctcgcgtgcgatgtagtaggcgatcgtctcggaatcgatggtcgtctggaaaatagcgccgctgtactttagcttttcgcggaggtcaacggcatttgtcaggttgccgttgtgcgctacggccagcgtgcccttgatatagtggatgatgagcggctgcgcgttttcgcggttgctcgcgccggcggtggagtagcgcacatggcccacgccgatattgccgtgcaggcgattgagacgctcctcgtcgaatacctcgtttacaaggcccatgtccttgtagtaatccaccttgcctttggggccctcggtgtcgctgacggcgatgccgcagctttcctgtccgcggtgctgcaaggcgaataatccgtaataaatggaagaagaaatgtcgtgtccgtcaaaatcgtatgcgccgaaaacaccgcattcctcgccgggcttgtccgtttcaaatggtgttcgatcgtagttcatagaagtcccccgttcctccgcaaaccgcggtattctgctgtttgtgttcagtttatctgccgaaaatacacaggcggcaaacgccgtgaaaacgtttcccgcttaacagaattattataatcggatttttgtgaaattgcaattctaagttttaaaaactgcaaatatgtgtagaggatgacaaaatcctttgacaaacggcgcgcaaaatcgttgaaacaaaaaacaaaatgcggtataatagcaagcgaaagaaacgacgagcccgaacagtccgggggactgttcagccgtaagaaaccctatcaaaggttttttaaacggcggtcagaaacggccgttagaaagagccataacacatttttacatgtaggataaaaaatgaaagacagaaaggacctcgctatgcatatcgttattttggacggcggctctacaaaccccggcgacgtctcgtgggcgccgctcagggcgctcggcagcgtcaccgtgtatgactccactaagcccgaagaaatcgtggagcgcgcaaagaacgccgaagctgttatcttgaaccgcaatgttataagccgcgaaatcatgcagaaattaccgaagctgcgctttatcggccttcttgcaacgggatataatactgtcgatgtcaaagccgcaggagaactgggcatcaccgtgtgcaatgtgccgctttattgcgtggagaccgtcgcgcagcaggcgtttgcgctgcttttggagctgtgcaatcacaccgaaaaaataagcgccgccacccgcggcggcgactgggataaggccgaaacgatgagccacagcacgcacccgctgtttgagctgtacggcaaaacgctcggcatcgtcggcttcggacatatcgggcagaccgtcgcaaagctcggcgcggcgctcggcatgaaaattctcgtatacagccgcacgaaacgggagctgcccgagcgttatcagtgggcggagctcgacgcgcttttcaaaaatgccgatgtcgtctcgctgcattgcccgctcacggacgagacccgcgggcttgtgaatgcggagcgccttaacctgatgaagcccactgcgttccttatcaatacggcgcgcggcgcagttgtggacgaagctgcccttgccgaggcgctgaatagtggccgcatcgccggagcggggcttgacgttcttgtgcacgagccgccgaaaaaggatgacccgctgctcaccgcccaaaactgtatcgtcacgccgcacatcgcgtgggcgtctcgagacgcgcgcgcccgtctcattaagactgtcgccgagaacctgaaagcgttccggaacggcacgccgcagaacgtcgtttcgtgattttaccgctcttttcgctttttgcggagacttcaaaagccttctgtaaaaagtaatgcagaaaagagcaaaaggcgagaaatgaatctcgccttttgctctcttttggggaggagttgtattgaaaagtcgcggtaacgtttaccgcagagctcgttgtcatttgttatgtctctattatagcgactgaaatatcgattgtcaacggtttctgcaacaatctcccttttgctattgtcgcacaaatcaaaataaaaatttgtgtatactttgcacatataaattgaacgcgttcttccacataagccgtttgaaatcgtatctcacccttaaattacccgcatgttctctgctttatacatgaaaaagagaattttgtgtttgacggaggtttttccatgataaagaaaaatgatttgtttgaagcggagatcaccgccatgaccgccgagggcagcggtatctgccgcgcagatggcatggccgtgtttgtgcccggtaccgccgtgggcgaccgctgcgtcgtgcgcgtcgtaaaagtcctcaaaaagtacgcattcgggcggctcgaggagctgcttacgacgtcgcccgatcgcaccacaccggattgtcccattgcaggcccgtgcggcggctgtgtttaccgccacatcacgtatgaagcggagctgaagatcaaaacgcagcgtgtccgcgacgccttggagcgcatcggcggctttgaaaatatccccatggagccgatcctcggcgcgccgtcccgcacgcgctaccgcaacaaatgccagctgcccatcgggctttccaaaaacggcgaaatgcagatgggcttttacgccgtgaattcccaccgtatcatcgacacgcacacctgccttttgcagcccgaggtatttgatcgcgcggcggaagcgttccgcgcgtggcaaaaactgagcggggagagcatctacgatgaagcggcgcacagcggcgttttgcgccacctttacatgcgctgcggcgaaaagagcggggaggtgctcgtgtgcatcgtcgcgaacggcgcaaagctgcacggggaagacttgctcgtcaaaatgctgcgcgaggctgtgccggaaattaccggcattgtgttaaacatcaaccgcgagcgcacaaatgtcgttttgggtcgcgagctgcgcacgctgtggggcaagcccacgatccgcgatacgctctgcaggctggagtttgaaatttcgccccacgcgttttatcaggtgaaccgcacgcaggcggaggcgctttacaacaaggccgcagagtacgccgggcttacaggtgcggaaacgctgcttgacctctactgcggcaccggcaccatcggtctttccatggcgagccgcgcgaagaagctcatcggctcggagattatcccctccgctgttgaaaatgcccgcaaaaacgccgcgcacaaccatgtcacgaacgccgagttcctttgcggtgacgccaaagacgccgcgcgcatcctctacgagcgcggcgagcgccccgatgtcatcgtcattgatcctccgcgcaagggctgcgatgccgccgttatcacgaccatcgccgccatgcgccccatgcgcgtcgtctacgtctcctgcgaccccgccaccctcgcccgcgatttaaagcagtttaccgccgaggactataatattgaggccgtcacccccgtcgatatgttcccatgtaccgcgcatgtggagacggtatgtcagttagttctgagaaaaccggcagtacatatcaacattgatgtggatgttgaggaactggtgcaggataaaagagggacggcaacctatggtcagatcaaggattacgttcttgaacatagtggcttgaaggtcagcagtctgtatatcgcacaggtgaagcagaagtacggcatcatcgagcgtgagaattacaacaagacaaagtctgaaaacgtcaagcagccccagtgcccgccagagaaggaaaaggcaattacggaggcgttgaaacattttggaatgatttgacttcaacataaggaaaacccgaagcagcacggtaaaggtactgcttcgggttttttactgtttggccttatatgcttcgccccaagcctgcatggaatccagaatgggcttcaggcttttaccgagttccgtcagcgaatactccactctcggcggtacttcggcgtagacctcacggtggacaagcccgttttcctccatcgcccggagttgggcggtcaagaccttctgagacacattgcctacggactttttcagttccccgaaccgcttcgttcccggcatcaggtcacgcagaatcagcaccttccacttatccccgatgagggtcagcgtggtctccacaggacaggcaggaagagtggcttttgcggtcatttcgctcatatttgaatccctcccataaaaattttttcaagcgccaaattgccggaaaacccaggaacggcgcaatcgtttctttctggtaactacccattagtttctatttggtaactacggcacaatattgtgcttactttacgaattggggctacggcattattataatgccagaggcaaacgaaagcaagcccaattaccaaggaggttactcaaaatgaaaaaaattctttccctcgcgctggctcttgccatgatcggcacagctctcaccggctgcggctccaaggacgctgctaccaaaacacccgctgaaaacacccagcagactgcacctgtccagcaggagcagagccagaccgaaaaggcgctggcgctcatcaacacctttgccaccggcgatacggacaccgcccgcagcctgttggcggatggctacatccagcacaatctggcatacggcaccggtgcggatgcctttatcggttccgtggaatatctcgcatccgccgatgtgaaaaccactgtgaacaacatccgtgcttttgaggacggcgacaaggtgttcttgcagacgatttacaattttgccggtgccggtgagcaggtcgcctttgacatcttccgctttgacggagacggcaagattgccgagcattgggacaatctggcggcgctggccgagccgaatccctccggtcacacccagatggacggcacgatggaggtcacggatctggataagaccgaggaaaaccgggagctggtcaagaatttcctctacgatgtcatgcagggcaacaacctcgataagaccccggattactttgatggtgatgcctacatccagcacaacagcggcattgccgatggtgtgtccggtctgaatgccgcactgggcgctctggcggagcagggcatttccatggtgtacgatgaagtccacatggttctggcggagggtaacttcgtccttgccgtcagcgagggtaccttcggcggtacacccaccagctactatgacctgtggcgcgtggagaatggcaagatcgccgagcattgggatgtgatggagaccatcgcagaccagtccacctggcagaatcagaacggcaagttctaattgttacccggaggtaaccataccacaatattgtgcgtgcttcacaagtcgtacaaatcgcattacaatcaaagcatcaagagaaaaaacaaattacggaggtacttatcatgaataaagtcgtagaatttctgaatgccaaccctgtgcagtatcttgctaccgtcggtcgtgacggcaaggcaaagtgccgtcccttcatgttcgcgggcgagctggacggcaagctgtggttctgcaccaacaacaccaaggacgtctacaaggatatgcgggaaaatccggagatcgaaatttcggtttccagcccggagtatgcgtggattcgtctgcacggcaaggctgtgttcgagaataacatggccgccaaggaaatgtgcatccagaaccccatcgtgaagggccagtacggcgagtccaccaaccccatctttgaggtgttctatctggataatgcccacggcgttatcgctgacttctccggcaaccctccctacgagttctaagaaactctctcaattcaacatcttcggggcaaggtgaaatccctgaccggcagtaaagtctgcgaagcgcaaaagcgcccgatacggtgagattccgtaaccgacggtatagtccggatgaaagaagatatgaggaagcagccccgcaggaaaacccgtcctgtggggctgtttcaaatcccagcatatcttttccaaggagcaatcatgaataccgtttccatcgaaaaaagcagaaagaccgctgttctttccgtccgtaccatctccatgaccgccatgctgtccgcagtcgcttatctgctggcctttgtggagtttcccgttcctctctcgccgtcctttgcgagaatggacttatctgaccttcctgcactcatcggcgcatttgcctttggaccgctctccggtctgctgattgaacttgtcaaaaacgccttgcagcttctgaccacctccaccggaggcattggcgagatcgccaacttcctgatgggcgcagcctatgtggtcactgcgggtttcatctataaacgccataaaacgaagaaaactgcgctggccgcctgcgtccttgcaagcgtcgttatgggtatcgccgcagcactggcaaattacttcatcctgctgccgctgtttgagaactttatgccactggatcagctcattgcctcctttgccgagttcctgccttttatccataccaagctggatgtggtactgttcaatgcgttcccctttaatctgctgaaagggctcgtcatcggcggcgtgacgatgctgatctataaacggctcacgccgatcctgaaaggacgttgacggtatgacgaaacaagattatctgaaactgctggtggagagcatccactccaccaccattgccaccatcggtgcagacagccacccccagacccgcgtgatcgacatgatgctgtgggatgaacagggtgtgtattttctcaccgccaagggcaaggcgttctacgcccaactcatggagcaaggcttcatcgccctgtccgccacaaaggacaaaatctcgatctccctgcggggcaagatcaggaatatcggcagcgagaagctggatgaggttttcgagaaaaacacttatatgcagtccatctatcccggcgatacccgcagtgcgttagaggtgttctgcttgtacgaagcggacggggagtattttgacatcagcgacccggcacacatcgtccgggacagcttcaccatcggcaaagcggcacaggaagcaccgggttactatgtgggcgaaggctgcatcggctgcaagctgtgctactccgtctgcccgcagaagtgcatcgacattaccaagaagccggtggtcatcgaccagcaccgctgcctgcactgcgggcggtgtgcggaaacctgccctaaacaggttatcgaaaagagggtttgactatgaaccagagcgaaaaaagactgtttctcatacaatctctgctgaacgaacgtccctcctgtcagaagcagatcatcccggcggattccgagcggcagaatattttactgcgcgggctgatgaatgtccgtagaccggtgcgcattggtgcggattttctgcaagtgcaggacgcctatctgcaagacgaaaccgccgcaaagggtatcacggatattgccgacctgacacccattcagccggggctgtatctctggcagggcgatattacgacgctcaagtgcgatgccatcgtcaacgcggcaaactccggcatgaccggctgctatattcccaaccatcgctgcattgacaacgccattcacacctttgcgggtgtagaactgcgccttacctgtgagcaactgatggaacagcagggctatcccgaacccaccggacaggcgaaaatcaccccggcgtttaatctgccctgccgctatgtgctgcatacggtcggtccgatcatcagcggtcgagtaaccaaagaggacaaagaactgcttgcctcctgctatcgctcgtgcttggagctggcggcagaaaacgatctggaaagcgtggcgttctgctgtatttccacaggggagtttcattttccaaacgatctggcggcagaaatcgcggttcggacggtcaaagaatatctcaaaaagcaaaccagcgtcaagaaggtgatcttcaatgttttcaaggatttggacaaagccatctacgaaaagctgctctgagccgatggaacggctgaaagcagcattacaggactgtgatgccgtggtgatcggagccggagccggactgtccacggcggcgggcttcacctacaccggcgaacggtttgaaaaatacttttccgactttgcggcaaagtacggtatccaagatatgtattccggcggctttttcccgtttgccacgccggaggagcattgggcgtattggagccgatacatctacatcaaccgctatatggatgcccccaaaccggtctatgatgccatcttaaagctggtacaggacaaggattattttgtcatcaccacgaacgttgatcactgctttcagaaggctggctttgacaagaagcggctgttctacacgcagggcgattatggcctattccagtgcagtgagccgtgctgtcaggaaacctttgataacgaagccgtgatcctcgaaatggtcaaacggcaggaggacatgaaaatcccgtcagagctgctcccggtctgcccccactgtgggaaacccatgaccatgaacctccgcagcgatgatacctttgtggaggacgagggctggcacagagcagcagaacggtatgaggattttctccgtacccgtacgggtggcaaaattctcttccttgaattaggcgtaggctacaataccccagtcatcattaagtaccctttctggcagatgacagccaagaatccagaagctacctacgcctgcatcaaccaaggtcaggcagtttgccctcaagaaattgagcaacgatcaatctgcatgaatgcagatattggacaggttttgcagagcctgtctgatgctgcaattcaataaaagaaagcagttctaccacgcacgtattgtgtgatagaactgcttcttttgcattttctgagcaggtgttccaaactgtatttttaaagcttgggtactcgcagcgaagaaaatatggggtgttcagagggggggaatcccctttgacgcagggtttccaataggggcgcgagcatccctgttggcacacgattttgcttgcaaagtctagtgtgttatacctttgcttccggctgacgcgggaaaggggctggcttcgccatctgctgtacgggcagatagcggttgacagacacttttctgcggcagtaggacaggcggattttgtgacaccaaggtgacacaaatgcaggatttttgagaagcaaaatccgactggccggagaaggaagcagaggtatataccgccctcgtcccgccgcagcgacacactaaaaccaccacggcagttccagccagaggttgtccatcgcagtatcttctaacgtctttgcgcggctctcccgcagattgaaatgaattgctgagccgatcatcgtatgctccacatcgtccgtaaagccatagcggtacagcagataggcttgctcacgctcggaaagtctgcccaaaccttcgtacagctcacgcatggtttctttgtccacataaatctgttccggagatttgacggtcggatcagcaatggcttcaatgcgcatcagccgttcctcaccgggaaggatctcatccaaccggattttctgcaaggcaagtccgtctgtggtgctggtcattctctgctcatattgggagaaaacatcccgtatcaggtcggtcatggtgttgcggatgaacggtgcggcgtaagtcaaaaacttgatgcccttactgctgtcaaagaggggaatggcggtcagcagaccgaggcagccctcctgttccagatcgctggtttctgtactgaggtcactctctgccagattggacttcatataaatctcattggcggttttgcggatgaaacccatattgtttttcagaagaaggtcacgagcctctgtgtcccctttttgagccagcgcacaaagctgctcattgtcctgcttcttcatcgcccttctcctgtaatggggcttgctctaaggtggtctggaaaaagccagtcaacgcctgtccaagcgtattcaacgcatcccgattgacaccatccaagccagccacactgccgataatcagatcagatacctgctccggtgtaatggttggatttgtcatatcctgtccctttgcaacctctgtaaacattcttttagcttgctctgcggtcatcgactgcatggcagcaaagtcattgccgatttcctttttcacttccttgaccgccagcataaactgattttcaatggtgacaaggtcagcttgataaactgatgttctcagatgtgcgatgtcccgtgcagcttgttcgccagcttccgtttttaccgttttccgcgtcaggctactgatagtcgtatatagctggttctgtgcagcatacccggcggcaaccgtatcgttgaaatactgctccaatatgtaggtcaaatcaagaaaacgagggctttccagcaggtaattgactacctgagcgtttgcttttccggcatagaggtttcttgccgcctgtgcagataagccaagctcgtcaatggcataattctttttgtcagggacattggttatgcctaaaagaaagtcggtggagacattaaaagctctggcaatacggatgatattctcgtctccgagcttgtccgtctttccggtcagaaaccggctgagtaagctgtctccgcagccgattttcagcgcaaggtctgtctgggatactttatggtatttcatcagatcggcaatgcgctcccggacagtaccgggtaaaaaggtgttttccattggttatgtccccctttcctctgtcggctttttgatatattttccgcttcggattctggcatcggcaggcttttctgcatccgccgggataatccagcggcttcctgcccgctgtgcgccggtgatgcgcccctcattacagagaacgttcacgcgccgatgggagatgccccatttctctgctgcttcaaaggttgacaggtatttcattcgcattcgccctccttccccaaaactaactttattatattcaataagtggaataatatcaaggcatatcttgtgaacattcgccgtcctgtgatttttgcatttttgcaaaaattcagggcggctttttctttttttttgcggaaatgccggattttccggctcaacccgtttttctccgtatattcaggtgacaagaggaaattgtcaaaaaattacggaggtatttgtatgaatctttttgaaaacgtcaaggcggtggtcacagtgagacaagctgccgaacactacggtttgaaggtcgggcgcggcaatatggcctgctgccccttccacaatgaccacacgcccagcatgaagctgaatgaggattacttctactgcttcggttgcggagcaactggtgacgtgatcggccttacggcaaggctgttcaatctgagcaactatgaggcggcgcagaagctggcgtatgactttgggattgacccggacaagccccctgctgcggcagcactgcggaaaccgaaatacccgctggcaaaggcgttccagagagaggaactgcactgtcggcgggtgttatgcgattatctgcatcttttggagcattggaaggtgcagtacgcacccgaaacaccggaggatactcttgatgaccgtttcgtggaagcctgccagatgctcgattatatcgaggatttgacagatattttaacctttgcagagttggaggctcgtgtgaaaactgtggatatgcttcaaaaagatggcatgatcgaccggctggaagaacgcctgaaacggacggcaaaggaggtggatgcccgtgacgaaacggaaatcggctaatttagacgcgcccatctggtttgatggcacaaatatcaatgaggcgctgttctgtgatgaatttctgagcagccggaaaatcatctttgccaacggtgctttctttacgccggacggcagagtgaccgatgatctgccgcttcgtggcgagatctacgaagaactgaaatgctgcgccgtgaacaacatcccccgcaaaatcacaaacattctggaagtgatgaagctggcggctcatgtagaggatttcgtgccggagacagacaaaatccatctggcaaacggcacgttggcgctggacggcagctttactgagggcaaacctgatattgtacgcagcagacttccggtggcgtaccgtccggatgccccagtacctgccctctggctatcctttttggatggattgctgtatgcggaggacatccccaccttgcaggagttcatcggttattgtctgattcccagcaacaaagggcagcacatgatggtgattaagggaaacggcggcgagggcaagtcgcagatcggcgcggtgttgggggcgctgcttggcagcagcatgaaggacggcagtatcggcaaaatctccgaaaatcgatttgcccgtgccgatctggaacacattctgctgtgcgtggatgacgatatgcggatggaggcgctgcggcagaccaactacgtcaagtccatcgtgaccgcccaaggcaagatggatctggaacgcaaaggcaagcagagctaccaggggtggatgtttgcccggctgctggcgttctccaacggtgatctgcaagcactctatgaccgaagcgacggattttaccgccgtcagcttgtgctgaccaccagggaaaagcctgcgggacgggtagatgatcctgaccttgccgaaaagatgaaagcagaggtcgagggtatctttctatgggcgtttgagggcttgcagcggcttgttgccaacaacttcaagttcacagaaagtcagcgtacacgggataatcgggaggcagtcaggcgggataacaacaacgtctttgattttctcgaatcagagggctatatccggctgaaagcagactgcaccatcagctccaaggaattgtacgaaatttatcggatgtggtgtgaggaaaacaatctgacgccgctaaagcgccgcagcttcagtgagagtgtgattgcgaaccagaacaagtacaatctggaatactgcaacaagatcaccaacgctgccggacggcgcgtatgtggctttttcggtattgaggcagttgccagacccaatatcaacgggttttccgatgtttcagagcgtacgtacgtaccggatgactggtgatgatttttctgcgactgtgctgtgtacgtatgtacgcagcgttttgccccaaacgacgctatataggaagaatgctgaccggcagaacctatatttggagggcgtgaatcaagacaagtgaaatccgcaaagaatttgaccgttgacagaaatggcttcacgaaaccgcgctgctcggaactgcgtaccggcattacgaaaaaagtgtgcatctgcacggttttatgaaatgccacacggtttcgtaaagtcgatacccctcacctatgaaagggcatcgaccgccgcgtttccagcggatttgagcagaacagatttttacaccagacagcgaagcggatgcgccgaatggcgtgttggcatcgctttttcatgatctgaattatgggaggatttgaatatgagtgtacgcaacgaaatcaaggcgcagatcgtccgcgccggttttaccatgcaggaggttgttgatcttcttcatgacgaatatggttggtccgacagcgtctccaacctgtctgccaagctgcaaagggagagcatccgctacaaagaagtcatggagcttgctgatgtgctgggctatgaccttgtatggaaacggagggagagataaatgagtaagccgcagtttgccattctccgatttgccaagtacaaaggaccggaaatttccaatattgaagcacacaatgagcgaaccaaagagaattacgccagcaatccagacatcgacaagagccgcagccacttgaattttcacctgattacgccggaacaaaaataccgggcagaggcagagcgacagatcaaggacgctggctgccgtacacgctcggacagcgtgcgcgtggtggaagcgctggtgacggccagcccggagttcttcaagggtaagaaaaagggcgaggtcaaagcctattttcaggaggcgctggactttattcagcagcaccaagacccgaaaaccatcatatccgccgtggtgcatatggacgagaaaacgccccatatgcacctttcttttgtcccgctgacggaggacgggcggctctgcgccaaggagattgtcggcaacaagaagaagctgacgcagtggcaggacaggttttgggagcatatggtcaaaaaataccccgatttggagcggggcgagagtgccagcaagaccgggcgcgaccatattccgccgagggtgttcaaggaaatgacccgcctgaccaagcagaaggccaagctggaagaattgctttcaggcgtcaatgcgttcaatgccaagggaaaagcagcagaaatcggcgcttttttggacaagtatatcccggctgtggagcagatgcacacgacgctgaaaaagtacaatacggcgtttatcgccacgaccgccgagaacaaaaaactgaaaaagaaaacggagcagttggcgcggtcgctggacaaggccacgcaggaaagtaccttgaaaaagctggccgacgccaaactgcaccgggattatgaggatgctgtcgccgtgctggatcgtattccgcaggaagtgctggcggcatatacgcacagaacggagaaagagagggagactgcctatggtagatgaatggagcggcttcgctgctttgctggcaaatttgattgaaaagtatgccgtggttctggatcttgacgcgctgcccgatctcgtcatagaggaatccatgcccgaaaaagtcgaggcagatgatatgattcacgaaaataatattgaatcagcgaaagcggcatgatataattatcatgaaataagtgtccaaaccgccattgcaggagcttttgctcctgcaatggcagaaaacgaggtgaagtgaccatggaacgctgggagaatgagcagaacaattctgaaatgatgatttataccacagaggatggcttgacaaagatcgaaacgaccttcgatggagataccgtttggctgtccattgaccagatggcggagctgtttcagcgagacaaatctaccatttccagacatatcaagaacattttcactgagggcgaattgaagcgagaagcagttgttgcaaattttgcaacaactgccgctgactgcaaaacctatcaggtggattactataacctcgatgtcatcatttccgttggctatcgtgtgaaatcccagcgcggtgtgcagttccgcatctgggcaacgggaattttgaaggagtatatgcgaaagggttttgccctggatgacgagcgcctgaaaaatctgggcggcggcggatacttcaaggaactgttggagcgcatccgcgacatccgcgcttccgagaaggtgttttatcgacaggtgcttgaaatctacgccaccagtattgactatgaccccaaggcggaaatctctattcagtttttcaagaaagtccagaacaaaatccactatgccattcacgggcagacagcggcggaggtcatttacacacgtgccgacgcggagaaggaatttatgggcttgaccacctttgcgggcaatcagcccacgctgaaagaggtggtagttgccaagaactatctgaacgagaaagagcttcgtgctatggggcagcttgtgtccggatatctggattttgcggaacgacaggcagaacgggaacaggccatgaccatgcaggattggtcggaacatctggatcggattctgaccatgagcggagaacagttactggttggcaatggaagcgtcagccacaagcaggccatcgacaaggcgaccggcgagtacagaaaatacaaagcccgcaccctcagcgaagtggagcaggattatctggattccatcaagctgttggagcagaaaacggataacaagcaaggctgactgaggatatgcccatgaaaaaagaaaagataaaagtttatatctacacgcgggtgtccaccgctatgcagattgacggatattctctggatgcccagaagtcccgaatgaaagcctttgctgacttcaacgattatgaaatcgtgggcgaatacgaggacgccggaaaatccggtaagtccatagagggcagaatccagttcaatcagatgatggaggacatcaagtccggcaaggacggcgtatcctatgtgctggtgttcaagctgtcccgcttcggcagaaatgcggcggatgtgctgtccaccttgcaggtgatgcaggatttcggtgtcaatctgatttgtgtcgaggatggtattgattcctccaaggatgccggaaagctgatgatctccgttttgtcggcggttgcggaaattgagcgtgaaaacatccgtgtgcagacgatggagggcagaatccagaaagcccgtgaggggaaatggaacggcggctttgcgccttatggctacaagctggaaaaggggcagcttttcatcaacgaggaagaggcagaagcaattcgtgtaatttttgaccagtatgtgcatacggataccggtgcaaacggtcttgcaaaataccttgcaacccatgggattcacaaaatccaaaggcaaaacgggaaaaatcccctgtttgattctgcgttgatccgcaggattctgaaaaatccggtttactgcgggaaaatcgcctatggtagacgccggacggagaaggtgcatggcacacgaaatgattaccgtcttgtggagcaggatgactatttgctggttgacggactgcatgagggaattgtctccgaagaactatggcataaggcgcaggtcaagctgttggcacaagcggaaaaatacgaacgcgtcaacagagacaaggatacaaaaatacatctgttgtccggcattgtgaaatgcccagtttgcagcgtaagaatgtatggaaacaaaagcatcaagcataaagcagatggtacgaaatacaaggacttcttttattacggctgcaagcaccgcacgatgacccatggacataaatgcgacttcaagaagcagatcaacgaagaactgctggacagcgccgtggcggaggttatcgtcaagctggtaagcaatccgaagttcgccgccatgatgcaggaaaaagtcagtatgaaggtggatacctctgccattgagcaggaaatcagcaactatgaaaagcagcttcgtcaggcttattctaccaaatccaagctaattgaagaaatcgactctcttgacccagacgaccgtcattaccgcagacggaaatctgatcttgatgatcggctctatgggatgtatgataagattgaagaattggaatctctgctgattgcagccagagccaagaaacaggccattgaggcagaaaagctgaccggcgataatatctacaaggttctgatctacttcgatcagctctatggaaagatggatgacagagagaaacggcagctgattgaggaactgatctctgaaatccagatttacgaggaacgccagcccaacggtcagtggctcaagtccatcaagttcaagctcccaatcattgcggaggatatgagtttgagtttggacaacgatgcacatattgagacggttgtacgcttaaaacagaacaagtaggtgaaaattcatgcagtacaaggccgaaaataagcttgatatttttgagtttcatgatgcggagctttcgctcggttgcttcgataaaaacacacttgtgtttagcgccacgcatttgaatattcacaagcacacgaagcaaaacccgggagattgtgacttggagatcgagcgggcggtacttcggtttgagcacatggaaagcgtaacgtttgagaacagaagaccgattgaaaacggtaatccggtcggagaacagatcgtgcttgaaggtgccgatgcggtgaaggaaatgctttccggctttgtaaagggaatcagagtatttgccctctttgaggaaaatcggcggattatcatggattgcattacggacggcatagaagtagactttacatttttcaccatcgcctttacgccgcagacgacttctgtcgagtgggacgcgtatatcggcccggcttggtatgaaacttaaatcgttacggcttttctgcaagataaattgataacgctgctaaaatgttgacaacataataccaacctattataataaaatccggctttattagtatttatgtttttcgttgtgataggaggataaaatgttaaaaaccgtcctgctccagaaaataaaaccgtaccgtcgggtaaataaaaaaggcttcacgcttatggaaatgctgattgtcgtggctgtcatcgcgatactcattgcggtcgcgattccggttttcagcgcacagcttcataaggcaagggtcgcaacggactgggcgaacctgcggtcgttttacgccgacatacaaacggattatatgacaacaggggagcaaaacccgaaagtccccgtagattggcacacaaacccagcttacgactggcattcggtgacgtttttgaacgggcagaaagtcaaaatgaaagcaggcttctgcgcggtgagttttacaaaagatgtgggttattcgatcgaatacgagtgtaacgacggacacccagcgtgccatctcagcctgcctgcacaataatatcttgtttagaagactttgtgcattttatgtgcaaagtcttttttatgttctcgattccctcggcatcggtgctatgccggatgccgaggcgtttggcgatgtcggcgttgatacattcggccatatcgccgataccgtgaaagcgatggagaccccgaacctcaaaaagcttggcatgctgaacctccacccaacaaaagatatgctgcttgcagctttcggagctgctataaaagatgtctttttcgtagtatccgtcaagcaaaaaagagagttctgctggcggttttttactttttcctctacactggaggaaaagggggagatgcttttggaacgaccggtattcagctttttttcaaaacttattatgccgctgttttacgataaaaagtttttgcgtggccgctggtttgaggaatccagtctcggctggacatggtgctggcgaaacttgtggatgcagaaggtaaagggcatcaatcgcgatattccgttcccggtttttttccgcaatgaagtaagcagcgcggaaaatctggttttcgacccggatgatatgaacgattttaacgcgttcggctgctattttcagaatttcgccgccaaaatcgtcattggcaaaggcagttatatcgcgccgaatgtcggtctcgtcacggcgaaccatgtgctgaccgatttggagcagcatcagcccggcaaagacatcgtgctcggcaaaaactgctggatcggtatgaattccaccgttttgcccggcgtggtgttgggcgaccacaccgttgtgggtgcgggttcggttgtgacgaaaagcgtatccgtcaggccatggaaatgctcacgcagacaaacgaccgtgtgctgaacatctgctacgcctgtggcttcaataatatcaatcattttaaccgtattttcaaatccatcgtgggcgtttcgcccacccagtaccgttctgcaaaccgcgaggaagcgcagaactgatttgatttttgtaaaactgttttgggttgacacggtgaaaaaaagcggtatataataatagaaaaatactgcgaagcagaaggttttgtgaaccatctgctatcccgccaaactctgtctctcaaaatcaaaacacagcttacccgcatcacggaaagccggaaaacgcatccggcagagaacctccccgaagacgacctcaaaaagctccgaaaatatctcatcgccgaaattcgaaagtgagggaaaacatgaaaggcccaaaaacgctctacgtctccgatttagacggcacattattacgtcatgaccaaaccgtctcgccgttcacggcggaaacaatcaacacgctgacggcgcgcggcatgctgttttcctacgccacggcgcgctcgctcgtcaccgcgaaaacggtcactaaggggctcaacacgcactttccgctcatcatttataacggcgcgttcgtccgcgataacgtcacggaggaaattctgctcgcaaattactttgacgcttccgtgtacgcggttttagatgaactcttcaaggcgaatatctaccccatcgtgtacgcaaatgtggacggcagagaacatttttcctttatctatgaaaagtgcacgctcggcctgaagggctttgccgatacccgcgtaaacgacccccgtacccgcgaggtgtatacgacagaagagctcacgcgcggcgatcttttctatatcacctgcatcggcgacccgcaaaaactcgcgccattttacgaaaaataccgcgaaacctaccacgtcgtctactccaaagatatttactccggcgagcagtggctcgagatcatgccgaaaaccgcatccaaagcgaacgccgtccgcgagttgaaagagaagctcggctgcgaaaagctcgtcgtcttcggcgacggcaaaaacgaccttgatatgttccacgctgcggacgaagcttacgccgttcaaaatgccgacaaagaactgaaagccgccgccactgccgtcatcggcggaaacaacgaagacggcgtagccaaatggcttttggagcatgctgatttttaaaattcggagggaaatatgtacatttattacccaagctgtaactttagcgcggcaagtcccgcaacggcaaaaaaagtcaaagcgtattttgaaaaacaaatgccggttgccggctgctgccgcgtcgataaaagagagatttcccctgcggatatcgcgctttacatctgtcaggcatgccgcgaaacgctcgaagacaaagtgaaaacgcagtcgatgtgggaatatctcgatgccttaaaagatttcaactttccgaatctaaacggtcaaaaattctatgtgcaggattgctggcgcgaccgcaatcacccggagatccacgaagccgtgcgcagccttttaaagaaaatgcacgcggaagtgatagagatcgagcataaccgtgaaaaatccatattctgcggcaacctgcattacgaaacggatgatccgcgtctcaaaaactacccgaacactccactgtacaagctgtccgaagacctgcaaacctctctcatgcagcattatgccgcgcagtttgaccccaaaatcccggtgctgtgctactgcaaccgctgttatgaatgccttcgcatgggcggtgcaaccgccgttcacctgctcgatatcgctttttctgaaatgtaaagacagatttgtttcctttcagacaggaaacgaaccgcaaaatcgcctatactgaatacagcgacagaggaaaggggagagcgtaaatggagtggctgcccggcaacaaggagtacgaccttgccggcaagtacaacatcgagtggtattccgcagacggcgacccggacagcaccgactacgagtccgctatctggatccccgttatcccgaaaaagtaaaatcttatcacgccataagaaaactgccctgccgatgcgcaaaacggcagggcatctcctattttatgtcggttcccgggtaaaaccgtgccaaaatttcgtcaaccgtcatgccgccttccgcaagcgttatggcggccgcttgactcatgcccacgccgtgcccatagccgagcgtcgcaaatgtgaacgcgtcgttttcatacgtcaccgtaaaactcgcgctgcgtaaaccgagcgcctcccgcacatgcacgcctgtcatttccaccccgcagaccgtaagcttttccacatatcccgtgtcaaaatattgaatatccgaaaaccattttcccggcgcatcgtcaaatgaaatttccgagaaatcggctcgtatctcgtcttccgtaaacgttgccgcgctctgaaacccctgcgccaaaaggtcgctcgggcacgccacagcggtgaggtacgggtagcttttttccggccacacgttttcaaacggctgcgtgcacccggcagaaatcgcaaaataacacgcgttgatcggctcgttttcaaaataaatttctttgtcgagcaccgataagcacagcgcccgcacgcggttttgttcttcgtccgtcagccccgcgtcggtcgtgtagatgctcttttccgcgctgtcacaggtaaaatcaaaatctttccccgtgttttcccgccgcttgcggtcatagagcgtgtgtatcgcgatgatttgtgcctttaacgcctcgtcgggggcagaaacagccatctcacacggcagcgccccgcagagaaaatccagatcgttcactgtgcggaccgtctctgttgccgtgtcgtaaatgcgaaaaacagattcgctttttgccgtgccgttctccgcaaacagcagcggcgttaccgcgcaaaacagatacagcgcacccaaaaacgcgaaaaacctgcgtaccggccattttgatttcagcttcattttacacctcaagatgaaaaaacttattgtcactcatgcaatattttgtgctaaatttattttttgtagaataaatcaagataaaaatgaaagatattgagtttcataattcaaaaatgcttgacgaaaccgcaactctgcgctattatatatctactacgcgaaaatgtgcggaacgcagtgcgaagagccgcgcaggaaaggatgagcagttttggaaagattgataaacgaaagtgcaagcagcacaacagtcagcgagctttgcgccgagtatcgtgccaataaccagattacaaaggatgaatacgagctttaccacgtcaaacgcggcctgcgcaaccgcgacggcaccggtgtcatggccggccttacgcacgtctgtaacgtgcacggctacctcatcagcgacggcgtgaagattccggatagcggccgcctcacataccgcagcatgaatgttgtggatatcatcaacggctgccgcgcggaaggacgtttcggctttgaagaagtcgtgtggcttttgatcttcggcaagctgcccgatgaacgccagtataaccgcatctgtcagctcctttacgaaaaccgcgagctgccggaatacttccccgaggacgtcattatgaaaaacccgtcgcgcgacgtgatgaataagctcgcgcgtgccgttttgacgctctattcctacgatgacgacccggacgatctctcactcgaaaataacatgcgccaaagcatctcgctcattgcgcgtatgccggccatcatgacgtatgcctatcaggtcaagcgccgccattacgataaacagaccatgtttttccacccgttcgagccgcagcacaaaacggcggaggcgattttgaatgccctgcgcgaggatcgccaattcacgcacgaagaagcccagctgctcgacctttgcatggtgctccacgcagagcacggcggcggtaacaactccacatttaccacgcgtgtgctttcctccgcgcaaacggatatctactccaccatcgccgcagctatcggctccctgaagggcttccgtcacggcggcgcgaaccacaaggtacgccagatgatgacggacatcatgcagaatgtgcagcactgggacagcgatgacgaagtggaaaactacctcgagcgcattttgcgccgcgaggtgggggacaagagcggcctcatctacggcatcggtcacgccatttacacattgtccgatccgcgtgccgtcgagctcaaaaaacaggcgcgttccctcgccgccaaaaccggctacgccgaccagttcgcgctgtatgagcgcatcgagcgcttagctccggacgcgttccataaagttacggggaacgagaaagtagtatgcgccaacgtcgatttttattccgggctcgtctatgagatgcttggcattccggaagatctctacacgcccatgttcgccgtttcgcgtatctccggctggtgcgcccaccgcattgaggagctcacaacgggcggccgcatcatccgcccggcgtaccgcgcgctgcccaccggtcagacctacatcccgctcaaggaccgccattacgatgcaaagtctgttttgtaaattaaacggcataaaagcccaaaacggcttgctttttgccgttattgcccgtataatcaaattcagaaagcagcaaggtgtgtgcgacggccctgtcttcgcccgcacctttccgtttgtataattccattaaatctcgtttctctacgaaaggaagagggggtaaaatccatgaaagcacccatcacatttgccatcgccggcttcggcgaccgcggcagcacatacgcttccatgcagaagcttttcccggaccgcatgaaggtcgtcgccgtggcggatatcaacccggaaaaggtacagaaagcgaaagagctctacggcatcaaggatgagctttgcttcacgagcgcagaggaaatgctcgcgcaggataagcttgccgatgtcatggtcgtttccaccatggaccgccagcacgtcaaccacgccattccggcgcttgaaaagggctataatatcctgatggaaaagccaatctccccggatcttcaggagtgcaagcgtatcatcgaggttgcaaagcactgccccggcaagatcatcgtatgtcatgttctgcgctataccacgttctataatacattaaagtccattctcgacagcaaaaaaatcggcgatgtcgtctccgtctgtgcaaacgagaacgtcggctactggcaccaggcgcactcctttgtgcgcggcaactggcgcaacagtgaccagacaagccccatgatcctccagaagtgctgccacgatatggacatctacacctggctgctcggcaaaaagtgtaaggccatttcctccgtcggcgatacgcacctcttcaaaaaggagtgcgcaccggagggcgcaacgccgtactgcctcggcggctgcaaagcgaaggaaaactgcaagttcgacgccgagaagatctacatcacgaaccccgcaacgggcatccgcaacggcaatacgtggatggcgggcgttgcctgcggcgtgaaccccaccgaagagcgcacctatgaagcgctgaaaaacggtcagtacggccgttgcgtctatatgtgcgacaacaacgtcgtcgaccaccagcagacgaacctcctcttcgaggacggcacaaccatgagcttcaccatgtgcgcgttcaccgaaaagtgctaccgttatttcaaggccatgggcacgaacggtgagatcgaagccgatatgctctcgaataaaatccacgtccgtgtcttcggcgagccggaagaaatcattgatgttaagctccttgcaaacgacctcaagggtcacggcggcggcgacagcggcatcgtgaacgacttcctcgatatgctcatcaacgagaccgaagccaccgagcgcaccacaacgctggagcactccctcgaaagccacttcatggcgctcgcagccgaagaatcccgcctccgcggcggcgagctcatcaacatggatgcgttcaaaaacggcaagtaatttaacaatctgaacataaaaaatcctgcacgcatgataagctgtgcaggatttttttactatattcaatttaatatttcatcacaaatacgtgtccacaatggcctgcgtctcatcgcgctttgcttccatttccgccacaaggtggaactggttgcgtgcgcggtctaagttgtgctgcgggtacttcgtcttaaagtacacatcgccgttcaggtagtccgcaaggaagcggatgcccacctcaaacgtcatcagcttcgcgccgtccggcagcgtgcggatttccgtctcggtcagcgccttgccggcttcgccgaggaagccttccgtgtacgccttaaagagcggcacgctgaagtgcaccttcgtcagatcggtttcgtcctccgcaccggtggaagcgcccgcgcggatggaatcaccgaagtcaaacgccgcaaggcccggcatcaccgtgtcaagatcgatgacgcacaccgcgtcacccgtcgcgttatcaatcaaaacgttgctcattttcgtgtcgttgtgcgtcaccttcagcggcagcttgccctcctcaagcaggttcatcaaaagcccgcagtccgtttcgcgtgcctttgcaaattccagctcggccgcaacattctttaagcgcccggctttatcctcacgtaccgcgtccatcagttgccggaagcgcgccggggtgtcgtgaaagtgcgggatgacctcgtgcagcgtctctgccgggtaatcagagagcatgttctgaaacgcaccgaacgccgcgccggatttttccagcatctccggagattccgcaaagtcatacgccgttgtgttctccaagttgatcgtcgagcgccagtagttgccctcactgtcgatataataatccttgccgtcgtttgtctttaaaaccgtcagcgtgccacgcttcgggtctttgccggcctttttaagcttctccgccaaaaacttcgtcacgtgcaccatgttgtccatgatctcatccgggtgtgggaacacatacccgttcacgcgctgcaaaacaaagttgcccttttccgtgcgcgccagaaacgtgtcgttgatgtgcccgccgccgtacggttcaatggagcttacacagtcgccgtaaaaatacgcctttgcggcctcgttataaagaattccctttttgtccgccatgttttatccccttagagtaaatttaaaaccgtcaattattgatgatgatgcgcaagatttcggaaccgcccgccgcgaaaagatccatcgcgccgctgtaccgctccaaaatgccgcgtaccacttccatgccgagcacctgcggctttttcggctcaaacagcttatgtacaaggtcgttcacggagcttttcgtcgccggtgtgcgctttttctgttttttctgcgccgagtacaccgcctcaaacgtgatgcggttttccaccggcagcgccgtgatgcgcacacgcggctcctctgcgccggagtgctccgcgcagtcgatggcgtgcgtcagcatgtcgttcagaatcgcgcagaattcaatggttttcagccgcaccgcgccaagctccacattgctttccaaaacgatgccgcagtgtgccgcgtaggccgccttgcccgccagcactgcattcacatacgggttttcgctgtatcgctgtaaatacggatcgtgcaggactgtttcctctttgatgatattcagtacgccctcgcagctgccgtcctgcgcctcagccgcaatctcatgcaaaacaaaatcatggtgctcctgcgcgttctttgcgtttgtcacgttgcccaccatcgcgcggaaataatccgcctccgcgccgagcagctgctcgcggtgctcggccgtgcaggcactctcctggtactttgccgcgttaaatgccgcacgcaccgtaaacgccaaaacaaggtacagcgccgctgtcagaataaggcgctgcgttacgctgttcaggccgaaaaaagtcggcaaaattccatttgcgcagaataaacagacaacaagcgccgcacaaagccccacagacagcaccgaaacgccgcgctgtgcaaaatagcgaaacgggtgtgccagcgtcatgaaagagaggaatgtcagcacaatgtacagtaagctgccgatgaccgccgaccagatgccgtcgcccgcaaacggcagcgctttcaaaagcgtggtcgtcacgggcagcaaaaacgcgtagttgcagatcatcaaaagagaaaggctcagcttctgcgccaaattgttcgtgtagaggaataccgccgcaaccagcaataagagcacattcatgccgttgccgaattgccccgtcgcgtcgttaaaggcaggggagagcagcagattcagcacaatagaaagcacaaacacgccgcccgaaacaatggcctctgccagtagccgaaagcggctgtttaaaaccgtcagaaataaaagtgcattgcacagaaaaacgaccggtaaaagcattttaaaacgcctcacttttccaagtttgtgtgcgcgaacccctaaatcgcacacaatttttttcagtataccatatttggccgcttctttcaacaaattccacaaagaaatgttccgcagcacgaatttttcgacactacggaacacatttatgcattatacaattctatatctcttaaaaatcagcccatgcggcggttctgcttgccagtgacagattccatctcaatgcaccacacacccgtcgatttcggccccgtctccacgcagccggtttcctctttcgtcaaactcggcacaaaacggtcgcaaagcagacgcagcgcacggcgtttttcatcgaaatcagttacttctgtcactttgccgcgcaccacagtggaggtatagagcgtcgtcagccccttttcgtagatcgtcgggttttccacaaacagcaggcaaacctgcggattttcgcgcagagagttgaccttcagtccctccggcgcgctgtggaagaacagcttctcgccgtcacgcaccacgttcagcgccaccgcatacggcgtgccgtccgtcgcaataagggaaagtatgccgtaagcgcagcggtcaatgaccgcaagcgcatcctcgcgggaaatcgcgcggtcggcgcggcgcattttggtcatgtctgatttttgggacatatccataataaataaacaactccttgttctttgttggctttagtatagcattgtatagtgccgaaaacaaccgttttcaaaaaacacgcgaattttcgacgagaaattgcaaaatttcgctgtgaaattgccaaatttcgcataagcccttgttttattccgggttttacagtatatttaattggtatgactttcggaaaggagcgcaatggactgcacggcagtccatatctgtatatatggaaaacacagaagcaaaaagaaacatcaagctcatcgcgttcgatctggacggcaccacgctgcacggcttcgcggaactttcagagcgcaaccgccgcgccatggaaaaggcgaacgacgcaggcattctggtcgtcccggccacaggacgcgtgcgcaattttattccgccgtgcctcaccgagctgccgtttattcgctacgccatcacctcaaacggcggcgccgtgtgggatattctggaaaacaaagtgctctgcaccgatctcattccaaccgagaccgcgctcgaagtgcagaaaatttttgacgattacgagctttatgtggaatactacgtgcacgggcgcggcgttacaaagcgcggcaacccggataaagcccgcaccgttttcggctttcctgaagaaaaatattacttcctcacaaaagattatacgttcacggacaacctctccgcgtatttaaaagaaacgcacgccgagccggaaaagatcaatatgatgttcatcccggaaagcgtccgcccggaaattttggcccgcctgcaaaagttaggcggcatcgagcttacattctcgaacgtcgataacatcgagatcaataaaaagggctgcgataagggcaccgcactgtattcgctctgcaaggttctcggcatcgatcccaaaaacgccatggcggcgggcgataacggcaacgacctcggcatgctgaaagccgcaggcttcgccgccgtcgtcggcaacggcatagaggaagcgaaagcgattgccgatgccgtcgtcgcaccgtgtatcgaagacggtttcgcggaagccgtggagcggtttgcactgagataaaaagaaaaatataaaagcaccatttgaaaggaaccaaactatgctgaatgtcaacggggtcgccatcaattttgatggtcagaacctcttttcaaacgtcaatctccagtttttgccgggcaactgctacggcatcatcggcgcaaacggcgcgggtaaatccaccttcctgcgtattttgtccggcgatttagagcccagtaagggcgaggtcacgtttgaccccaaatacagaatgtccgttctgaaacaggaccactttgcttacgaagaccaaaccatttttgataccatcatgcagggcaatgcaaggctgtatgagatcgcacaggaaaaagacgcgctgtacgcaaagcccgattttgatgaagaagacggcaaccgtgccgccgagcttgaagccgaattctccgagcttaacggttgggacgccgagaccgaagccgcaaagctcatgcagggcctcggcctcgacagcaacgatatgtataacaccatgagcactctgaaccagaccgaaaaggttaaagtgctcttggcccgcgcgctgttcggccagccggatatgattctccttgacgaaccgacgaacggcctcgacgccaaagccatcacatggttagaggattttctcattgagtacgagggcaccgtcatcgttgtctcccatgaccgccactttttaaataacgtctgcacccatattgtcgatgtcgattacggcaagatcaaaatgtacgtcggcaactacgacttctggtatgagtcgagccagctcatgcagcgcatgatgcgcgaccagaaccgcaaggcggaggaaaaaatcaaggagctccagaacttcatccagcgcttctccgcaaataaatcgaagtcccgtcaggcgacgtccagaaagaagctgctcgataagatcaccgtcgaagaaatgcccgcgtcctcccgccgctacccgtatgtcggctttacgatggacagagagctcggcaaagatgtcctcaccgtctcgggccttacaaagaccgtagacggcgtaaaggtgcttgataacgtcacgttcaccgtcggccgcacggataaaatcgcgttcaccgcatcaaacgagttcgccgtgccgacgcttttcaaaatcttaatgggcgagctggagccggatgccggcacattcaagtggggcgtttcgacgagtcagtcctatttcccgcaggataattccgcctatttcaccgatacggaagattctatcatccgctggctcgagcaatattccaaagacaccaccgaaacgtatctgcgcggtttcctcggcaaaatgctgttctccggcgaagacgtctataagcccgtgcaggtgctttccggcggcgaaaaggtgcgctgcatgctctcgcgcatgatgatgttcggcagcaatgtactcctgctcgaccagcccacgaaccacctcgacctcgagtccatcactgccgtcaacaacggcctcatcgatttcaagggtgtcgtgctgttcgcatcgcacgaccacgagttcacccagaccgtcgcgaaccgcatcatcgaaattctgcccgagggcggcacgttcgaccgcgttaccacctacgacgagtacctcgaaatgcgcggctaaacccgtattgaatacggctaacccgcaaaagttgcggctgattcattagtctccggacaagcttttatcgaaaatttcaaaatccgtgtaacctgccgatataaaacgcctacttataaagtgaaggggaagggaggacaaaagcatgaaggaagaccatgagatcatcgagctctactgggcgcgcagcgaaagcgccgtgcacgaaacggacgcaaagtacggggcaaagctccacacgctctccgggcgcattctgcccgaagcagaggatgccgaggagtgcgtcaacgatacgtacctcggcgcatggaatgccatgccgccgcagcgcccgctcgcgctctttgcatttctggcgcgcatctgccgcaacatcgcgtgcgataagttagacaagctccgcgcgaaaaagcgcagcgcagaggtctccgcgctcacggaggagctttcggcgtgcatcgcagacccaacagcagcaagggaagcggaaagccgcgagattgccgaagccttaaacagctttctctcgacgctccccgtcgatgcccggctctttttcatgcgccgttactggtatatggattccgtaaaagccatcgccgaaaagtacggctgcggcgaaagccgcgtcaaaacgtccctccaccgcacgcgtgaaaagctgcggaattatctccaaaaggcagacatctggctttaaagaaaggcgggaacagtatgacaggtatcgatttgttcaaggccctcggcggtgtaaaggaagaatatatcgcggaagcggacggcagccgcaagctgccgcacgtgaaaaatgtcacgctgcaatggtgtgccgcgctcgccgcgtgcgtgtgtctgctgctcggctggggcttcatcgcgcagcacctcggcggcatagccgattacaccggcgacgaaacgaaagtcacaggcgccgccgagaccgcgcaggcagacggcgcagatcagggcaccgcgcccgccatcggcggcaaggtcgttttgcctgtgcgcatcacggcagaaacacagcccgtaagcgacgtgaaggtcttcacagacgaggaaaaaatcgggcagatcatgccgctgcttctcttaaagaacgcggcggaaacgagcgacgacccgaacgcatacggcggctcggctaacattttcacgctggaatacgcaaacggcgaaacgagtacgatcacggtttacggcaatctgttctataaaaaggacgacggcccgtggtgcgatattccgtacgaacaggccgaaaagctcgaagagctcgtccgcagccttgggtccgacgaataaaaccgtaaaatttgacaaaaaaggcaaataagactggattttcccgcggttccccgctataatagaaataatgtctttctccgcataatcttgcggaagaagaaaacgaaaacgctctgaaagcgtaaaaaaggggaatttgcaaatggaaattgcaattacagtcttgctgctcatcgtgggtctcgtgctcatcatcaagggcggcgatttctttgtggatgccgcatcgtggatggcggaagcctccggcattccgaagcttattgtcggcgcaacggtcgtcagcttcgcgaccactttgccggagctgcttgtctccatctttgcggcgcttgacgcacgtgccgcagaggcactttcgcccggcagcggcatcggcatggtggatatgtccatcggcaacgccatcggcagcgtcacggcgaacctcggtctcatcatgggtatcgcgcttgtcgccattcctatggcaatccgccgcaaagattacatgctcaaaatgattctcatgctcgtggctgccgctgtcaccgtatgtttctcactgtttgataacggcgtcggcgtggttgccagcattttgctcatcatcattttcgtcattgccatgtacgacaacatccacgaggccgtcgtcgccgtcaagggcggggcaaagggtcagcagctcgatgagcccgtcacgaaaaaagccgtcatcaccaatgttgtcaagttcctcatcggtgcggtcggcacggtcgccggtgcacagctccttgtcgataacggctccgcgctcgcttccatgtgcggcgtttcggatcgcgtcatctccgtcaccatcatcgccatcggcacgtctctgccggagcttgtcaccacgctcaccgccatcgcgaaaaagcagggctcgctctccgcaggcaacatcatcggcgcaaatatcatcgatctgaccttgattctgcccgtatgtgcgctcatctacggaagcaagctccccgcgtcgcctaccgtcgccatggtcgatatcccggcatgtctcatcatcggcattctgtctgtcgtgcccacactcatcacgaagaagttctcgcgctggcagggcgttttaatgctcgccgcctacgccgtctatatcgtgcttagcgtcattgttatggcataacttgtaacttttgtaacgaaagctccgttttcaagaaaaacggggcttttttatgcacttttcaaatcatttcctcttgacttttcagcgctctgtatgctaaaatgtaacagaagtgtaacaaatgttattgctttgtaatttttgaatgtcaggtgagaagtgcatgcaggcggcagaaatgcagataaaaaccgaaaacagtgttgaggcggcaagcgccattcttcgcacactgcgtcatgccgtgccggtgctcttggccttgcttatcgctttgctcgccgccgcacccgttttggcggatgagaccgatgaagcgataacggataccgaaaccgtctccgccgaaccgacggaagacctccgggacgattacaccgccgtcgccgcgcagctggaagccgtcgcgcgcgcagagggcagagatatggcagataaaatgctcagcactgccctgcacagcctcacggggacttcggtcgatactgatgacgtcgaaagcgccgcctctgcggctgcgcccgaggccgcagaaccgaaggccgtcgtcgtcaacgcttccgcgcaggcgggcacgaagtggtctgcaaagggcattctgccgtttttggccgttgtgctgctggcgcttttaggtctctcgtttgccgtgcgccccatgcgccgccgtcgtgtgcattcggcccgtgcttattgccccatgcgtgaccgcactctgaatgacactgcgtttcaaggccgcgcacattccactttataaatccgatcataaggaaaaacatacttttcctctcttttcggcgccgctcggttctcgggcggcgctctttttttcgcaaacccgcataaatctctttttgacattcctgaaaatcccatttttaaaaatgcacacaaatccatcgtcaaactttattcatattttacgcaaaagcggttgacaaatcctgactttttccgtaaactgaacgtattgcgtttgcatctaaaaccaaataaaatcggctgttccggaaaggtcgctaaaacgggcaacacacaaagcgttgtgttgcttttatcctgttcggaaaagtgtttctgccgcggccggatcgcgggcgaaagcctgcggccgtgaaaaatcctttgcggaagcagtacgcatcatgcagccggggtgtgtgattcactgagaccgcgcaactttcgggggacaagggtcccaccaaaccgcaaaggggatgctttccatgttaaaaccaatcatcacgctcaaagacattgcagtatcgtttgacggcgagcaggtcttaaagaacttcaacctcaccatcggtgacggcgagttcgtaacactgctcggaccctccggctgcggcaaaaccacggttttgcgcaccatcggcggcttcgtcacaccggatagcggcgatgtcttttttggtgacgagaagatcaataacgtgccaccgcataagcgcgccgtcaatacgattttccaaaagtacgcgcttttcccgcacctgaacgtctatgaaaacatcgcgttcggcatgcgtctcaaaggcaagaaagaagacgaaattcaaaagaccgtcaccgaaatgctgcatatggtgaacctgaacggcatggcgcaccgcggtgtcggccagctttccggcggtcagcagcagcgtgtcgccattgcgcgcgccctcgcaaacgagccgaaggtgctcctcctcgatgagccgctttccgcgctcgatttaaagctgcgcaaggatatgcagaacgaactcaaaaaaatccagcaggccatcggcatcacgttcattttcgtcacgcacgaccaggaggaagcgctctccatgagtgacacggtcgtcgtcatggataagggcgaaattcagcagatcggctcgccgattgacatctacaacgaaccgaaaaacgccttcgttgcggacttcatcggcgaaagcaatattctcgacggcaccatgatcgaagactatctcgtcgaggtcgccggtcagcgcttcaagtcgctcgacagaggcttcggcaaaatggccccggtcgacgtcgtcatccgcccggaggatatcgacatcgtgcccaccggctccgccgccgcacacatcaacggcgtcgtcaccagcgtcacgtttaagggcgtacactatgagattatcgtcgatgttgacggctttaagtggatgatccagacgaccgacagcgccaacgtcggcgataagattggccttgcgctcaccccggacgacattcacgtcatggcgaagtccgtttactccggcactatgggcgattacagcacgttcagtgacgaaatggaggaagcgctccaggaggagggcagcgaacatgaggactaagctcatctctgccccatacacgatctggatgacgctgttcatcatcgtgcccatgggtcttgtggcattctttgcctttaccgataaaagcggcgcttttacgttagataacatcgcgcgcgtcggccagtattccaacgtcttcctgcgttccatctggctcggcgcactcgcaacgtttatttcgcttctgctcggctacccgctcgcgtataccatcgccaaagcggcgccgaaccgccagagcttcctcattttgctcatcatgctgcccatgtggatgaacttcctgctgcgcacctacgcatggatgtccctccttgaggataacggcctcatcaacaatatgctcgccgccgtcggtctgccgcgcatccacatgatcaacaccgcgggcgcagtcgtcctcggcatggtgtataactacatcccgtacatgatcctgcccatttactctgtgctcaccaaaatcgacaacagcgttatcgaagctgcgcaggatctcggtgcaaacaaccgcaatgtcttccttaaagttgtcctgcccatgagcatgcccggtgtcatttccggcgttaccatggtgttcgtgcccgctgtttccacatttattatctctaaaatgctcggtggcggcggaaacctgctcatcggcgacctcatcgatatgcagttcctcggctcggcgtataacccgaacctcggctctgccatttcacttgtcctcatggtcatcattctcatctgcatgggcatcatgaaccagttcgacgacggtgaaaatgtgggaggaggtatgattctgtgaaaacggcttccaaagtctatacggcgctcattttcatctttctttacgcgcccatcatcgtgctcatcatcttctcgttcaacgatacggataccgcaagccgcacccagttttccggctttacactgcgctggtatcagcgcctgtttgaggatcgctatattctggaggcgctgctcaatacattgatcatcgccgtcgtttccgcgttcgcttccactgtactcggcaccatggcggcggtcggtatcaaccgcatgaagcgtatgccgaaaaaggtcatgatgaacatcaccaattttcccatggtcaacccggaaatcgtcaccggtgtttccatgatgcttctgttcgtcgcggcagtcagcctgttcggcggcaaaagcctcggcatggcgtcgctcatcatcgcgcacatcacgttctgcctgccgtatgtcatcctgtccgttctgccgaagctgcgccagatgaacccgaacctcttcgaggccgcgcaggatctcggctgcccgccggtacgcgcgttctttaaagtcgtgctgccggagatcatgcccggcatcgtcaccggcatgatcatggcgttcacgctctccatcgatgatttcgtcatcagctacttcacaagcggcaccacgcagacgctgcccatctacatttattccatgacgagaaagcgcatctccccggagatcaacgcgctttccaccgtgctctttgtgtgcatcatgctcttgctcatcatcatcaatgtccgccagggacgtgaagagcgccgtgccaaaaaggcagaaagggagcgtgcctgatgaaaaagaaattttttgccatcttttttgcgcttctggtgttctgcaccgcaggcgtgcccgcctttgccgatgaagccgacgactgggatttttccgaagaataccccaccgcagagcccaccggtgtgaccatcaatgtctacaactggggcgagtatatttcaaacggcaccgagggctcgcttgacgtcaatgccgagttcacccgtcgcaccggcatcgaggtcaactacaccacgttcgacagcaacgagtcgctgtactccaaactcgcaggcggcggcgcaagctacgatgtcattgtcccgtccgattacatgatctcaaagctcatgaacgagaacatgctcgcggagctggatttcagcaatatcccgaatttcgagtacatcgacgagcagttccgaaaccccgattacgaccccgaaaacaaattctccgtgccgtacacatggggcaccgtcggcctgttctataataccgattatgtcaccgagcccgtcaccagctggtctattttgtgggacgagcagtacagcggcaagattttgatgttcgataacccgcgcgacgcgttcgccatcgcacaggagcgcctcggcttctccctcaattccaccgacgaaagcgagtgggagcaggcggctatgcttttaaaagagcagaagcccctcgtacaggcgtacgtcatggatcagatttttgacaaaatggaaagcggtgaagcgtggcttgcaccgtactattccggcgatgccggcacgcttgtcgaaaacaacgaaaacatcaagttcatcgtcccggaagagggcacgaactactttgtcgatgccatgtgcatcccggcaacggccgagcacaaaaaagaagccgaactgtacatcaacttcatgtgtgaccccgaaatttccggtgcgaacatggatttcgtcggctacgccaccccggagaccgccgcgaaagactatcttgatcccgacgccgtcgcaaatcccatctactacccggatcaggacgtgctcgaccgcacggaggttttcgtcaatctcccgagcgagacgagcaatctgctcgatacactctgggcagaggtcaaaatgggcggccccggccaatccgcggttctcatcgccatcatcttagtcttcctcgcagtctacatcgccatcatcatctggaaaaaacaaaagcgcaagcgcgagatgatgtaacaactgcgtcaatagaagtatattgaaagctcttcgaaaatcactttcggagagctttttctctgtctgggctttttatcaaaaggcttcgcctttttaggaaacccatgcaactgggtttcctagttttggtgtaggtaaaaggtgttttgtcggctgtggacgacggcttagggcgctgccctaagaacctgcaagcttttgaaaaagcttgcgcaaaactttttacgttcttagcgtcttgcaatttcctctgcacctcggtataatgtggttagattcaaaacagaaagcaaggatgaaaaaccatgaaaattcagaatgtttcggatgccgcttttaagaagtacggcaaagtcatcacggggctcgattgctccgacattatcgccgccatggcggaaacgccctgccctgagaacgtcgtctatgtgcccggtgcagaatctctcgaaagctgcgcgtccgccaaaggcatcgcctacacgctctacggcggcatgcctgtgcagattggctactgcaacggcaacaaccataagttaaacggtctcgaatatcaccgcgatagtgaagtaaacatcgccgtcaccgacctcatcctgctcatcggctccgagcaggacatcgaaaacggcaagtacgatacgtctaaggtcgaagcgttcctcgtgcccgccggcaccgttatcgaggtttacgccaccacgctgcactatgcgccgtgcaatgcaaacgacggcggcttcaagtgcgtcgtcgcgctgccgaagggcacgaacaccgacatcgaaaagcgcgcgccgaagaccgaggaagacaaaatgcttttcgcccgcaacaagtggctgcttatgcacccggaagcggcagaagagggtcagtacgtcggccttgtcggcgaaaacatctgcgtttgatttgcgtagaacgccgtaaaaccgaacaaccggggcataccgcacggcacggtgcagtatgccccttttcgctcaaaatctatccataattagggggagacccatgacattttatgatctgctctggtattttaccatttattcgtttttaggctggtgctcggaggtcatttttgccaccgtcaccaccggcaagttcgtcaaccgcggcttcttaaatggccccgtgtgccccatctacggctttggcatgtcgctcgtgttgctcgttttgctgccgttttcggataacatccccttgctgtttatcggcggcgcgctgctcaccagcgccatcgagcttgtcggcggttgggcgctcaaaaaattcttctacaccacgtggtgggactattccaaccagcccttcaacctcggcggctatatttgcttaaaattcagcatcctctggggcctgtgtgtcgtcgtcgtcattcgcattgttcatacggctatcgcgtctctcgtgcactggattcccttcacgctcggcgcaattctggtcggtattttcatcgcgctgtttatcacggataccatcgtcaccgtgcttaccatccgcaagctcaacgaaaagctcaccgtcatcaacgatatgtccgcgcgtctgcgcaaagagagcgacgctatctcgaacggcctcggtcgcctgacgctccttgcagacgagaagatcaccgagcagaagcaggagttcaacgaaaaagcccgccctgtcctcgaagagaagcttcaggcacagcgcgctcagctttcggagaagtacgaagaataccgtgcgtcgctggaagaccgccgtgtgaaagcacagaagtctgccgaagacctccgtgcccagtggaacagcgttacctccaagctccagcgtcatacccagcgccgtttgctgcgcgccttcccgaccatgaaaaacgaccgcacagacgaagcactgcgccgcttgcgtgcgtggatggatgaaaagaaggaaaactgatgcgtcgctatgtggaaaacgttccgccctcgctcacgcaaaaggagctgcatgaccgtgcctacgcacttttgtatcgcgtcttaaaggacgagtggggcatcgcatcgcccgttgtggaaaaaactccgctcggcaagccgtatttaaaaggggagaacatgccccatatcagcctgagccacacgaagggcatcgtttgctgcgccgtgtcgcggaaaaatgtcggcatcgatgccgaatatccccgccgcgtgcgggggagtgccgcagagcgcgtctgtacgcccgcagagctttgggacatacaaagcagccccaatcccgccgcgcgctttctggcgtactggacgctcaaagagagcatctccaagtgccgcggcaccggcctttcggaatcgttccaaaactacgagatcacctttcagaacggcatgccgcatcttaacggctacacgctctttttcgagcagtacggcgtgcattttctcgccgccgccgaggaagcataaagcatagccgccccgcatacctatgaccgaaaagaaagtcttacccggttttctgcggtgaaaggtggcagcaatatgattgtatcgctcggcgcgaacaaaaaacgaattttggcggtgcttgtgctcatcgccatagccgtcagcgcgtttttcctcatcccgcgcggcgaaaagcgacagacattccccggtatgacgggggaggagcgcctcgcgtttttaacgtccttcggctgggaggcagaagcggagccgcaggatgtgcgcgaggtcgtcattcccgcaaaatttaacgatgtctatgcggcgtataatacgatgcagcaggcgcagggtttcgaccttttgccctatgccggcgaaaagtgcacgcagtaccgctaccgcatcacaaactacccgaatacgcccgatggcgtcttcgcaacgctcctcgtctttgagggcaatatcatcggcggcgatgtcgcgtccggcgcagaggatggcttcatgcacggctttgcggcagacagcgcccgctatgagatgccgaagtcggtcatcaaagagagcgcgtcgcccgcgccgaacaccggcgaatccacacaaaatccaacggaaagtgaaacaacatgagacttgataaattcctttcaaacgaaaatatcggcagccgcaaggcggtcggcacgctggtgcgcagcggtgccgtcgccgtcaacggacaagccgtgcgcaaaagcgatatccagatcgaccccgaaaaggatgagatcaccgtcaacgggaagcccgtgcggtacagcgcgtttgtgtacatcatgctctataagccctcgggcgtgctcaccgccacgcgtgacagccgcgcagagaccgtcttagacctcctgccgccggagcttaagcgccgcgatctgttccctgcaggccgtctcgataaggacaccaccggccttctcgttttaacgaacgacggcgagtacgcccaccgcatgttggcgccgaaaagccacgtctggaagcgttaccgcgccacgctcgacctgcccgccgaagaaagcgacatcgcgcgctttgccgccggcatcaaaagcggcgaaaacgagtttgcccctgccgtgctcgaaatcagtaaggacgatcctcacatcgcgtggacggaaattcgggaggggaagttccatcaggtcaagcgtatgttttcagcgtgcggcaagaccgtcacggcccttcaccgcgaatccatcggcgctttaacgctcgatcccacacttacgcccggcgaagcgaaaattctcgatccgagcgccgcagcgttggtttttgaaaaacctgcacaaataatctgaacaaaaagcatcaagaatttttgccgtttatttattttaactaaactcaaaggaaaaagtttgggcaaataaggactgttcagggacccgattttctgctatacttagtgcattgaaaagagacgttgttcgtcacatatggctgccaggctctgacgtataacaacctatcatcaggaggaaaaatcttatggcaagtgtaacacttaaaaatgtctataaaatctattccggcggcgttaccgctgttacagatttctgcttggacatcgaagacaaggagttcatcattctcgttggtccttccggctgcggtaagtccaccacgcttagaatgatcgcaggcctcgaagagatcagcaagggtgagctttacatcggcgaccagctcgcaaacgatgttgctcctaaggacagagatatcgcaatggtgttccagaactacgctctgtacccgcacatgaccgtttatgacaacatggcattcggtctgaagctcagaaagaccccgaaggatgagattaagcgccgcgttgaagaggctgctcgtatcctcgatatctcccacctgctcgacagaaagccgaaggctctttccggtggtcagagacagcgtgttgctctcggccgtgctattgtccgtgacccgaaggtcttcctgctcgacgagccgctttccaacttggacgctaagctccgtgcacagatgagaaccgaaatcgctaagcttcataagagactcggcaccacctttatttacgttacacatgaccagaccgaggctatgaccatgggtgatagaatcgttgttatgaaggacggcttcatccagcaggtcgataccccgcagaacctgtatgatctgccggtcaacgaattcgttgcaggcttcatgggctccccgcagatgaactttatcgatgctacccttgttaaggaaggcgcagattactacgtcaccttcggcgcagctaagattaaggttccggctaacaaggctaacgatgaaatcgctaactatgttggcaaagagatcgtcttcggcatccgtccggaagacgtacacgatgagccggagttcatcgagaagcatccggagtccagagctacggctgacgttgaagttaccgagctgatgggcgcagagacctatctgtacctcaactgcgaaggcaatgctcttaccgctcgtgttgagccgacttccaccgctaagaccggtgacaagatcacgatcgctctcgacatgaacaagatgcacctcttcgacaaagaaaccgagaagaccatcctcaactaatcggttttataaacagcatacagacggcgttcccaatcgggagcgccgtttttgcgtatcacacgtactgtggtattcttccccacaagctttcggcacaggtcgcacagcttcacactgaatctgtccgcgttacgcttggcatttcactatctttaaaaagcatttgcatcgtgcgaaaactgtggtatactgaaatcagaacattcagaacataagggagtgcttttacatgtttgtaacagaagatattcgctatatcggcgtaaacgaccacgacgtagacctttttgagggacagtacaccgtagaaaacggcatgtcctataattcctatgtcatcctcgatgaaaaagttgccgtcatggatacggtagacgcccacttcggcgtggaatggctgcaaaacctcgaaacggagcttaacggccgtcgcccggattacctcgttgtgcagcacatggagccggaccattccgccaatatcgccgtctttatggagacatacccggaggcgcagatcgtctcctctgccaaggcgttcgtcatgatgcagcagttcttcggcacggatttcccggagcgcaaggttgtcgtcggcgagggcagtacgctcaagctcggtcgtcatactttgacgtttgtcaccgcgcccatggtgcactggccggaggttatcgtcacatacgacagtacagataaagtcctcttctccgcagacggcttcggcaagttcggtgcgcttgacgtggaggaagattgggcagacgaagcccgccgttactacatcggcatcgtcggcaagtacggcgcacaggtgcaggcgctccttaaaaaagccgccgcgctcgacatcgccatcatttgcccgctgcacggcccggttttaaacgaaaacctcggctattatcttgataaatacaacacatggtcgtcctacgcggtcgaggacgagggcgttgtcatcgcctacacctccgtctacggccatacgaaagaagctgtggaggagcttgccgaaaagctgaatcagcgcggctgcccgaacgtcgttgtcgcagatctcgcccgctgcgatatggcggaggccgttgccgatgcgttccgttacagcaagctcgtgctcgccacaacgacctataatgcgacgattttcccgcatatgcagaactttatcgaccatctcaccgctcgcaattatcagggccgtaccgtcggcatgatcgaaaacggcgcgtgggcgcccatggcggcaaaggtcatgaaaaagatgctggaaacgagcaagaacctcacctacacggataccaccgtcaccgtaaagtgcgccttgaacgatgcttcccgcgcccagattgacgccctcgcagatgagttgtgcaagtaaactgaaattgaagctttaagcaacatcccggtcgtaaaatttcggccgggatgtttgtgcaaaaagatgtcctgtgatatcctctcacgtccttgctttttgcgaaaaaatgtgttatactggctaaaagaaacaatagttcgattaaaacggagtgcgtgaacgtgcacaaaaccgcgttttgcgtgcagtgaacgaacaggcctccgttttttaagggggatactatgcccaaaaatccgattgtattcatgctcaatggccgtcgctgcacctgccttttgccggagggaaagcccaagcggctctatgtgctgtgcgggtgggagatggaaaagctgatgatgctactcgccgaagacgcgccggaggtattatttttttctacggaaatcgacggaggccgggatttcaccccatgggaagcggagcctatttggcccggtgagccgttttcgggcggcggggaagactacttaaaattcctgacagacacggcgctgccgtatttagaggagcgtttcggcgcgccgacggaacccgaaaactgtgcgctgctggggtactcgctcggcggattatttgcgctttgggcgctgacgaaaacggaaaaattcggtgcaggtgcaagcctttccggctctttgtggtacccgcagtttttgaaatatttggagaactgtccgcctaaaagggacaccgcaatatacttatccctcggcgaccgcgaaccgctcggcggcccgcccgtcatgcggacggtgggcgactgcacggaaaaggcgaaggagattttaagcaatcacggctgcaaggtattcttcgagtggaatcaaggcgggcacggcaagggcgtcaccaaacgctggcagcgcgccgtgcgcagacttttgaccatgatggcaaaaacggtggaaaagtaagacagaatgcggttttaatcgttaatgatggtggaaaacggagaggtgcgaagcgcaatgcaagagcagatcgagcgggaaggctgtttttgcggaaggcggatggaatgtaatttgcgcaggtttgcgtgataaaaagtcagggcttatgcaggttttgcagacggaaggagacgcgaaatggaacagcagagcttatttggaaaccgggcggggcaggacatgccgcttgcaacgcggatgcggccgcggacgctggaggaatttgcggggcagcgccatttgctcggcaagggcaaggtgctgcggcagctgattgaagaagaccgcgtgtcttccatgattttctgggggccgccgggcgtgggtaaaacgacgctggcgcagatcattgcggcgcggacgaaggcgaatttcatcaatttcagcgccgtgacgagcggcatcaaggaaattcgcggcgtgatgagcgaggcggagcagaaccatcgtatgggtgagcgcacactgctgtttatcgacgaaatccaccgctttaataaggcgcagcaggacgcgtttttgccgtttgtggaaaagggcagcatcgtgcttatcggtgcgacgacagagaacccctcgtttgaggtgaacgccgcacttttgtcgcgctgcaaggtgttcgttttgcaggcactttccgaggatgagcttgtggagctgatgaagcgcgcaatcaaagacccgcgcggcttcggtaaccagacggtggaaatcaccgatgagatgttgaaaatgcttgcagcgtttgcaaacggtgacgcgcgaacggcgctgggaacgctggagatggtcgttttgaacgggcaccgagagggcgacaagacgaccgtgacgatggagacgttggagcagtgcatcagccgcaagtcgcttttgtacgataaaaccggcgaggagcactacaacatcatctcggcgctgcacaaatcgatgcgcaacagcgacccggatgcggcggtctactggctttcgcgtatgctggaggcgggcgaagacccgctgtatgtggcgcggcggctcattcgattcgcgagcgaggacgtgggcatggcggacagccgcgcactggagatcgccgtggcggcgtatcaggcgagccattttatcggtatgccggagtgctcggtgaatttgacgcacgccgtggtgtatttgtcgatggcgccgaaatcaaacgcgctgtatgtggcgtatgagagcgcgaaaaaggacgcacagaaaatgctctccgagccggtgccgctcgtcatccgcaatgcgccaacaaagcttatgaaggagctgcattacggcgaggggtacgaatatgcgcacgatacggcggaaaagctgaccgcgatgcagtgcttgccggattcgcttgccggaaagaagtattacagaccgacggaacagggcagcgaagcaagggtgaaggagcgactgcggcggattgaagcgtggaaggcggatcggaggaagaagtgaggttgcgttgagcaaaacttttgacaacgattgacgagagagcgtgaaaattcgggggtgttttatgttggcggttaagttttacgaagatgtgaaagacgagctgctgcgttttgcggttgttattgcgaagcatgacggaaaatgggtgttttgtaagcacaaggagcgcgagacgctggagtttccgggcgggcacagagagatgggcgaggcgattgcagagacggcgaagcgcgagcttatggaagaaacgggtgcggtgaaatttgagattcgtccgatctgcgtgtactccgtgacgggcaaaacgcgcgtgaacgagacgggtgaagaatcgttcggcgggctgttttatgcggaaatcgcatcgtttggggagatacacagcgagatggagaaaattgtattatgcgacgctctgccgcaaaaccagacgtacccggaaattcagccggcacttttaaaggaggcggaaagacgggggttcggcgtataaacggacataaaaaagcacgcagagcataaaaatctgcgtgctttttgtgtgtattgtattgacttgaagcgccggggcgtcttcagtttttcggtttgtttttttcaaagaggatggagagccctttgaggagcaggtcgtcatctaagatgatcttgttgcggcaaaggggcgcgatgacggaggagagtccgccggttgcgacgaccgtgcagggggtgtttaattccgcgttgatgcggtcgatgaggccgtccagtgcgccggcgttgccgtagagcaggccgcttttgaggcaatctacggaatttgtgccgatggtatgcttcggcagctcgaacgcgaccttcggcagctgcgcggtgcggcttgcgagggcatcgtgcgagacggccacacccggcagaatcatgccgccgcggtatccgccctccgcatccagaacggagacggtggtggcggtacccatatcgataatgatctgcgggaggggatagtgatggatgcccgcgacggcgtccacgacgaggtcgctgccgagctgggcgggattatcgatgtggatgcgcaggccggttttgatgccggggccgacgacgagcggcgtgaggtgcaggtatttgtgcaccgcgtcgcgcatggtgagcgtgacggccgggacgacggacgagagaatcgcgccgtcaaccgcagtgatgtctgcgcggttcatatcaaacgccattttgagcatggcggcatattcgagcaccgttgcggtggggtttgtggagacgcgttcgcggaaaatgacctgtccatcggcacagcagccgatgacaatgttggtgttgccgatatcgatggctaagatcatgggaggacctccttttaatctgcttttttagcgggtgtttgaataaacccggcttttaagaggacgctgccgacggcgccggtgatgacggtggacgagagcatctcgaacacggcattgacgccgacgaacgcgcagacgaacagcagaatgttttggccgttgatcaagccctgcatgtactcggtctgcccgaaaagcaggatgagtgcggacatgaagaaaagcgtatttaagaacgcagcggcgaagcccgtgacgaagcacgcggcgacgcggttcagcttactgacgctgcggaagatgtagccgagcaaaaagccgtccagcatacgcgggacaaagcacagcaaaatggagaaaaacgggttgatgctaaaaagcgtggacccgagcatgctcacgccgccgacgccaatcgcctgcagaaagcttgtgaggccgaagacggatcctgcgatgagaccacctacaggtccgagggccagtgcggacacggcgaccgggataacgttgaacgtgatggcgagcggcccgatgttcagatagccgagcggcgtaaaggacatcagcagcaaaagcgccgtcatcaggccgagcagagtgagctgctttgcgttaaatttcttgttcatattcaattttcctttcttgttattattctccgtaggagatacaatacaatacgaaaaaagtatagcacagattttgaaaaatcgcaatgttttctattgactttgacgcggcgtaaagtgataaactgggcttagcccgagaggaggacgaaagatgaaaagtgagctgttcagtatttagtgcagcgcttttttgggacagaccttggtgcatgcatagcacaggatgcactccgtggcgtttttgcgctttcggctttctttgttgacctcgacgttcatcgggcagaccttcaggcatttgccgcattggacacatttgctttcatcgcaatgtacgcgcaggagtgaaaaatagctcatcggctttaagaagacggtgatcgggcaaagatatttgcagaacgcgcggttatccttaaaaataaacgcgagcgcgatgccgccggcatagtaaagaatgttgccgatgaggaacagccagaacatgatgcgctcgaggttcgagaacttcatcaggaacagggcggagacgagcgcgaacgagagcgcgaacatcacatagcgcagcgtgcccagcttttctttgcggggcttttgcggcactttgaacgggagcaagtctaagaccatggctgtccagcaggcataaccgcaccagccgcggccgaaaagcagcgggccgaaaatttttgcgacggcgtagtgaatcgtcgccgcctcgaacacgccggaaaacagatagtaccaaaagccctcaatctgcatgttctcctgcgacatcagtcccagatacacgagcatgtaaagaccgactgcaagctgcacaaactgccgcgcatagcgttttcccgcggtgaaaagcgctaagccgaccgaaaggcaagaacctatgtagctgaaattgaataaataaaacaggttgctttttgtgagccacagcgtaaccgctacgccttcaaaaagcagaaacatcaaagccgatgcccgatactttttcaagatgagcctccttgtaactgtgctttgtacatgttgtgcgtttgaaatttaattttacgctttcattctaccatatcccgtataaaacacaagggaaatctatcgcataacggaaaaggcattttatgaaagaagcggggctttgtgcggggtagggcgggaatgggggaaatgagcaaagatggggcggaaaaacggcttattctgtacacttttccgtcgtaaaaaacattgacatttggtaccaaaatcgctataataaagaacattagtgtacgcatttacccgtttttcggaattacaaataaaggtggtttatttactatggcagaaaaggcatattatgttacagaggaaggccttgcggcattgcaggctgaactggaggatttgaaggtcaaccgcagaaaagaagttgcggaaaaaattaaagaagcgctttctttcggcgacctttccgagaacagcgaatatgacgaagcaaagaacgatcaggctatccttgaggcgcgcatcgccgaccttgaagtgatggtgagcaacgcacgcgtcatcgagaaggaaaaccttgcggcagatactgtgcacatcggttcttccgtatttgtaaaaacgaaacgtgcggacggcagtgaagccgagcgcagcttcagcattgtgggctctaacgaagcaaacccgcgccagggcaagatctccgatgaatccgccgtgggcaaagcacttgtcggcgcgaaggtcggacagaccgttgaagtggagacacccgcaggcatcgtggagtacacgatcatctccgtatcttaattgagaatcaggcggtgcggatggaaaatccgcccgctttttttgtgaccgccgtgcggcggggaaaggaaggcagaaaatggcagaaaagaagaccccggaaacggaagcggaactgaccgaagtgctgcgcgtacgcagagagaagctcgctcagcttgtagaagacggcaaagacccgttccagatcacgaaatttgacgtgacgcaccacagcgcggaaattaaagacgatttcgacgcacttgagggcaaagaagttgtggtggccggccgtatgatgagcaagcgcgtcatgggcaaggcatcgttctgcaatgtgcaggacttaaagggcggcatccagtgctatgtggcgcgtgacgctgtgggcgaagacagctacaaggattttaagaaatttgacatcggcgacatcatcggcgtgcgcggcgaggtgttcaagacaaaaaccggcgagatttctattcacgcttcggctgtgacgctgctctcgaagagcctgcaggtgctgccggagaagttccacggcctgacgaacaccgatatgcgctaccgccagagatacgtcgatctcatcgtgaacccggaagtgaaggacacgtttgtaaagcgctcgaagatcattaaggagatccgcaatttcctcgacggcagaggatttatggaagtggagaccccgatgctggtttcgaatgccggcggtgcggcggcgcgtccgtttgagacgcattataacgcgctgaacgaagacgtgaagctgcgtatttctctggagctttacctgaagcgcctcatcgtaggcggccttgaaaaggtttacgagattggccgtgtgttccgcaacgagggcgtcgatacgcgccacaacccggagttcacgctgatggagctttaccaggcctacacggattattacggcatgatggagctgacggagaacatgttccgttaccttgccgagaaggtgtgcggcagcgcggtcatcacgtataacggtgtggaaatcgacctctcgaagccgtttgcgcgcttgacgatgaacgacgccatcaagaagtatgcgggcatcgactttgacgaagtgaagaccgacgaagaagcgaaggcgcttgcaaaagagcaccacattgaatatgaggagcgtcacacgaaaggcgacatcatcaacctgttctttgaggaatactgcgagaaggagctcattcagccgacgttcatcatggaccacccgctggcgatttctccgctgacgaaaaagaagccgagcgacccgacgaaggtggagcgctttgagctgttcatcaacacgtgggaaatgtgcaacgcgtactccgagctgaacgacccgatcgaccagagagagcgttttgcggcgcaggacgcggcgtttgctgcgggcgacgaggaagcgaaccacacggacgaggacttcctgaatgcgcttgagtacggcatgcccccgacgggtggcatcggctacggcatcgatcgccttgtgatgctgctgacggattccccggccatccgcgatgttttgctgttcccgacgatgaaacccttagatggtgtaaagaaagaaattggtgtaaattctgaagctgcaaaagctcctgatacaccaaaagcagaaccggagaaaattgatttttccaatgtgaaaatcgagccgctgtttgaggagtttgtagattttgaaacattctcaaaatctgatttcagagctgtaaaggtaaaagaatgtgaagctgtgccaaagagcaaaaagctccttaaattcgttttagatgacggtacaggcacagatagagtgattttaagcggtattcacgagtattacgagccggaagaactggtcggaaagacctgtatcgctattacaaatctgccgcctcgtccaatgatgggcattgactcctgtggtatgctgatttcggcagtacacgaagaaaacggcagagaaggtcttaaccttttgatggttgatgaccgtattccggcaggtgcaaaactgtattaagatgtaccgttttgcctgtgaaaacgggatgtacttcattttctgaaaagctcagattttacacaaatacaccaattttacaccaatcgatgtcaaaatcggtgcagaggtaaaaaaatcgcataattaacggaataaatgggcagtcccttaatgggattgcccatttttagaagaaatacgaaaaaaactcttgacctgtacgcagcgtacacgcttatactatcatcacaaggaggtgtatccgatgttattgaatgagattataaatgaagtcggaatgactaagcgtgcagtgaagtattatgaagaaaaaggattgttgtcagtagataaagatagcaatgggtatcgtaactactctgcacaagatgttgaaactttaaaaaagatttcagtatatagaaaactcggtattggtattaaagacatacagagccttttgaaaactggcgataaaagcattcttcttcgtatttatcaagaaaaattgcaggaaaaagttttacaagactcagaactcaaagctttgaagcaatttatagatgatggtaatgcggacaaagcaaatgagttacttgattatcaaacagttgaaaatgcgattgagtctttgttaccgggaaaagaatggggagaatatttaaaaaatcatttcaaaccatttcttaatgtaaggttaaagactccggagcagaaacaagccttacggaatatcttagagtattgtgataatacaacattgaaaattccttttattatgggattaggtgtgaagatggcgcacggaattgttcaagaaacaagaaccgcagaggaaatgatttcctactatcgtgatatgagtgaaagcgaatatgaaagattaaaagaagtggtattgaaaggtgctaaaataaaaactggcattatgaaatatcacccgtcgtttgttgcacaaagaaaaatgcagaaagagttccaagataaaggatataacgatatattcattcctaacttgatggctctatctccgcagtatgcagaatataagaaagcattagataaggtgaatgatagaatgtgtagagaacttggcctgcattatgatagcaactacaacttagttataaaaaaaggataattctaagtaaaagtttaattaccctttgagagaggaacaacctttctcaaagggatttttttatttacacgcttattcgcaaacttgggacaagtaccttttcttcatataataaaagcaaaggaaggagaggatttgatatgggtaatcttttatcagaggtacaccctgagcttattgaacaatggtctgaaagaaacttaccgcttacgcctgataaaatcacatacggatcaaataaaatagtttggtggaaaggagcttgtggtcacgaatggcagaccagtattaaggctcgctcaaacggtgagaactgtccgatctgctcaggtgcaagagttgtagagggtatcaatgatttagcaacgctgaagccggaacttgcagccgaatggtcgagtaaaaacaagacattaaaaccgacaatggtaagtgtcggttcccataaaaaagtgatttggaaaggcaaatgcggtcacgaatggagtgcaacagttaagagtagggctacaaacggcacaggctgtccgtattgctcccataataaaatcttagtaggatttaatgaccttgcctcacagcgccctcaaatcgcttctgagtggtctgagagaaattacccactaaagcctgatatggttacggtctttgcaaatcggaaggtatggtggcggtgcagcaaaggtcacgaatggaacacgctcatttccactcgttcaggcggaagcgggtgtccttattgcagcggtcaacttctgctgaaaggatttaatgatttcgctacgacacatcctcagcttgcacaggaatggtcagaccgtaatctgcctcttactcctgatatgataaacgaaaagtcccgcagaaatgtctggtggaagtgcagagagtgcgggtatgaatggcagtccgttgtctatgcccgtgtaaaaggaacggtatgccctgtctgtgcggatcgggcggttatggcagggtataatgatttagcaacgacggacgcacatcttcttccggaatgggactacgaaaagaacaaagatatttccccaaacaaaatatcaaggcactcaatgcagagcgtgtggtggaaatgttcactcggacactcgtggaaggcaaaaatttcagaaaaagcgattgaaggaaaaggctgtaaggtgtgtgaaaaagactatctgacggtttttccgaagctggcagttatgtattatgcagcgaagaagcgcataaaggtacagacggatacggataagattatcggcataccgcttgaaatctattttcctgaagaaaaagcagcgattgaaacggttagtcagacagagaaagtagaaaccttgaaagcatacctttgcaggaaacgggagatcaaactgattaaaatcccatttacattagaaagcagcgaaatcgacttcgctatgaaaatcaaaaaagcgtttcgcagcttacatattttcataacctcgaacgaagatgaggatacagcgtttatccggcagaggttttttgaatggagaaaagggcagaaaaaataaaggaggcggtctgatgaaagacaggaaatttcatatctaccttgatgacgaggagtacagacaggttttgcaggcgttaatcgcccttaaaaataatctgatagcgcaaggcagatatacggacgcagtagatgatgtccttatcaaatttacaaaagcacgaaagaaaaagattaccgtccagtacatctaaataaaaccgcagctatgccgcttgtttctctacggagaagcaggcggcttttttgcgtttttagggcaattttcaaggtcaaaaaaatttttttcaaattttttttcggaaaaggggcgattttgggtgtgcattttgcccccctttgtccaaatgagtgaaggggttattttcccgcaagggatttcccccttcaaagtaccttgaaaattgaatagacaggcgctaaggacattagttctgatgaatagcccgaaggtgggtacgctgtgacttttcctattctaatatacggagaacgagcgagaatccccgacctgaaattcagcttgctactgaaatggcaatgacagtcagaatgataatgatacttctctacggagctggcggagtacccggcagaggtgagattcctatgatacggtttcgcaaactgtaaccttagtgcttcccgtacaaagcgacttgctttccgcagggggtgttgagaacaaatactgcggtctttacatagccgcctcttattgaggcaggctgtgaaatctatgaaaggaggtaaagccggagatgtcaaactgcaagacgattgcggtatgcaatcaaaaaggcggtgtgggcaagaccacgactacggttaatttaggcgtcggacttgctatgcaaggaaaaagggtgctcctgattgacgctgatccgcagggcgatttaacgacctgcctcggctggagggatagcgacagcctttccgtaacgctgacagagaagttacaggcgatcatatcggagcaggagcaaaatccctttgacggtatcctgcaacataaagagaaggtagaccttgtaccatcaaatctcagtttatcttcattggaaatgacgcttgtaacagcgatgagccgagagagcgtcctgaagaattatctgagccttgtaaaagacaaatacgattatgtccttattgactgtatgccgagcttgggtatgattacctttaacgctctaacggcggcggacagcgtgattatccctgttcaggcgcagtatcttcccgctaagggaatgacgcagcttttggggacgattgcgaaagtaaggaaacacacaaacgccgatttaaaaatcgacggtattcttctgacgcttgtggacggaaggacaaatcttgcgaaaagcacagtggaagcactcagggagaatttcggcaaccatatcaggatatatagatcaatgattccggcagccgtaaaagccgcagaggtatcttctaaagggacgagtatctacgcctacgagccaaacagtccggtgtctaaggcttacgccggtttcacaaaggaggtgttagccgatggcaggcagaaagagcgacttcacgctgcccacgaacacgctcgatgagctgttttcctctcaggaggaaagggacgaagcgaagctgtctaaaatcagggatattccgcttgaggaaatcgacgatttccccgaccacccgtttaaggtgcgggaagatgaggatatgtttcagcttgtggaaagtatcaaagagcgtggcgtgattactcccgctaccgtaaggcagaaggaggacggcagatacgagcttatttcaggacacaggcgaaaaagggcttgcgagcttgccggatttgaaacgctcagatgtgaggtggtagacctcgaccgtgatgaagcgacgattttaatggtcgaaagcaacttccaacggtcgcagatacttccctcggaaaaagcttacgcatataaaatgcggctggacgctatgaaaagacaggcaggcagaccgagaaaagaaaattcatccccagtggggattgatttacgggggaagcaatcgcttgatttaatgagcgaggaatgtggagatagccgaaatcagatacacagatatatccgccttacaaaccttgttcccgaactgcttgaatttgtggacgagggcaggattaaaatgcgccccgccgttgagctgtcctatctgaacgaggactgccagagggatttggtggacgaaatcgacttgaacgattgtaccccgtcccacgatcaggcaattcgtatgcggaagttttttgaggaaggcaagctgacaacagaagcgatttctgcgattatgagcgaggaaaagccgaatcagcgtgagaagattgttttgcgtggggacagggtgcgaagcctgatcccgaaaaatatccccatcaaccaaacagaggagtatgtctgcaaggcgctggagcattacaacaagtttttgcgtaaccgtgccgagcgtgacagcaggtaaggcggagtgtgtttttcttctttccccttcctcacactccaacccctaaactatctcactatccgaaagaataaaactatctctcttgattacagctatctcacctaactcaatctatctcagaaaaacgcaccattccaaagcacaggaggtatgccctatgatgtaagattaaccttcgtttcacacctttgcctgaaatgctgtttcgcattacaatggcggcagaaaaggagtgaaacgcaatgaaaacaaaaacgattgtttttttattggctcttttgctgatcgtgcttgcaggctgcaacaatgccccgccgaatgaagataagccacagccgttttctttttcggagagtgttcaaagcacctctgaatccgaaacgcctgcgggaaaggaaagcaaggaggttgaaacaacgcctgaagccgtgcaggaagtaaagccgaaaaagcaggaagaaacgacggaaacggatacggtcagctccgaacagcctcagactgtttctgaaagcgggcaggcggcacagtccgccgaacagcccgataaagcggataagaccgaacattccgtatccacatcgcagccggatattccaaaagaaagcgaaacgcttgagccgcttgaaacggaagaaacaccgagcaaaaccgaaaccgactttgacattgactactggatttcctttgcaaaaggctacgctcagagtgtgggacttctgttagacagcgaggcaatttactgttgggataatccgatccgagccggagcgcactgcaaatatcttgaaagggatattcacagccgcttggatcggtacaaggctgacgaagaaatcacagccgtatggatttgggcggaggaagtctctgacggaatctacgacatctatatcggctatgcttaaatttaatattccattttgaggacgcaccgaaaaaaacggtgcgtttttctttttcaaggaggatttcagatgaaaattaagaaaccaaagcgcattatgtcgctgtttcttgcagcgctgatgtgcgtgacttcccttgtagggattggtacgactgcctatgccgcagaggaaacggacgatgtgtaccttatctcatatccccgtgatggagactcgaattacaacgccgaatggggacacggcagcctcacctttatgaacggctggaaaacaggcacttcccgttatacaaccgtccgtgcgatgggatcgtacaacggaaatatctgctactgtattgagatcggcgtcccgcagcagaccggagacagctttaccaaaaagggcgaggatttttgggacaactacccttcgtcctataacagtaccatttctcctgacgatattaagctgttcattggtcgtatcttccagtacggctatacgggaacaatctcaacctcgtggcgttctcagaacgagggcggcgataagctggctcacgcagtcgctacacagcttctcatttgggaaaccgtgatcggcgagcgtgatgaaaactttaacaaggtcagcacaggcggcaaggacgctgttctggatcagatcagccctaaccaccctctttatgacaaaattatgagctactacaattcaatggcggcaagtgtgcagaagcattccaagctgccgagcttcctttccaaaacgccgggaagcgcacaggagatcgagcttgaatgggatggctctaagtacacggttacgctgacggacagcaacaatgtcctttcgggatataagttttcgtccaatgattcgggcgttcagttctccgtaagcggaaacaagctgacgatcactaccgagaaagcgccgagcgacgggctgacgattaccgcagagaaaacggcgcagagaaagggcgttatcacttggacggacggtatctatggaccgaacggcggtgtgcaggataccgtaacctatgctcagactgtcaatgatccgctcaagggcttcctcaagctgaaggtatcttacggctcggcgaagattgtgaaaaccagcgaggacggaaaggtggacggtatctccttccgtattcagggaaatggtattgataaaaccgttaagacaggaaacggcggtcagattcaggtcgataacctaatgccgggagtatataccgtaaccgagcaggaatatgacagatacgagccgcaggagtcccgcagagtaaccgtagttgcggggcaggttgcgaccgtcaacttcaataacacgctgaagcgtggagacattgaggttatcaaatcctcggaggataatttcaatgagggcgtgaccttccacctttacggcacatcgctctccggcattgccgtggacgagtatgccgttacggataaaaacggtgtggcgacctttgaagatgtgctgatcagcggcactacgccgtacaccatcgaggaagtggataccgcaatccgttatgtcgttcccgaagatcagactgcacccgtcaagtggaatgaggttactacccgcaatttcacgaatatcctgaagaagtttaccgttaccgtaaccaagagcgacgctgagatgggaacggctcagggcaacgcctcgcttgcaggcgcaaaatacgggattttcaagggcgaacagctcattgacgaatactataccgatgaaaacggtcagtttaccacaaaagaatatatctgcggtgcggactggacaatcagggagcttgaaccgagtgaaggctatttgcttgatccgaccgtccacaaggtcggcgcagagccggagctttataccattgagcataaccagaccgcaaatgatgtaaacgaacaggtcatcaagggcaatatcgccattatcaaacatacggacgatggcgaaacacagattgaaacgcccgaagaaggcgcagtttttgaagtgtatctcaagtccgcaggctcttttgcgaacgcaaaggaatccgagcgtgatacgctcatctgcgatgagaacggctttgcacagacaaaggatatgccttacggcacatataccgtccatcaggtatccggctgggaaggcagggagctgatggatgattttgatgtgttcatcgcaaaggacgcccagacttaccgctatttgattaacaacagcaattttgaaagctatatccaagtagtcaaggtggacgcagaaacgggcaagaccattccctatgcgggtgcaggattccagatttatgatccgtccggcaatcttatcacgatggagtttacttatcctaccccgacaaccgttgacactttctataccgacgctaacggctcgctcgtaacgccggagaagctgccatacggtcagggctactctatcgttgaggtacagagtccttatggatatgttcttgattccacacccgtctattttgatgtagcggaagaaaattcttctgaggaaagcggggtaacagtgataaaagtcgaaaagaccaatatgccgcaaaaaggcacgattagtattgaaaagacgggcgaagtgttcttcggtgtctcagtaagcggcggaacagatgaaaacgggcaggaacttcccgttatctatcaaccgatctatgaaacacagggacttcctgatactgtctatgaaatccgtgccgccgaagatgtggtaacgcctgacggtacgctgagatacagtaagggcgagctggtcgatacggttacaaccgatgaaatgggttttgctgagagcaaggaactctacctcggaaaatacgaggtaaaagaggttaaggcaggctacggaatggtattaagcgatgaagtccataccgtagaacttatttacgccggacaaaatgtagccgtaaccgaaacggcgacttcctttgtcaatgaaagacagaaggttgaagtaagccttgaaaaagcgctggaaacaaacgagctgtttggtatcggcaataatggcgaaatcaaaaatatcagctttggcttgtttgccgatgaggaactcgtatccgcaagtggtacttccatcccgaaagacggtctgatcgaaatcatcacgcttgatgaaaacggcaaggcgaccgttaaaactgatctgcctttgggcagctattatgtaaaagagcttgcgacagacgagcattatcagcttagcggcgaaaaatatcccgttgtatttgaatatgcgggacaggaaactgcaacggtagcgattgcagtgaataatggtgagccgatggaaaataagctgatctacggctctgtatcaggtaagaaggttgacgaaaacggcgatggactcggcggtgcgctcattggtctgtttaagagcaatgatgtggaatttaccgaagaaaacgccctgatgaccgccgtatccggcgacgatggcagcttctcctttgagaatgtgccttacggaagctggtatatccgtgaaatcaagcagccgaccggattcgtccttgatgaaacggtttacgatgtaaacatttcagagaatgagcaagttattgagattgaaatcgtaaataagttggtgcgtggcaatatcgctcttacgaaagtggacgctgaatatacagataccaaactggcaggcgctgtttttgaagtctacaaggattccaatgacaacggcgagcttgacagtgaggacgagctgattgggacactgaccgaaaaggaaatcgggcagtatgaaatgaacgatttgctctacggacgctattttgtgaaagaaagcaaagcgccggaggacttcgttcttgacgagggtgtgtacgaggtattcatcgacacggacggtaagacctatcaggtggaaaacacggagggcaaaggcttcgcaaatgcgcctatgcgtggaaacctgaaaatcgtgaaaacatcgtctgacggaaaggtggaaggtttcgctttccgcattaccggagcaaacggctatgatgttacccttgaaacggacgaaaatggcgaaatcttcattgaaggactgcggatcggcgagtacaagatttccgaagtaaataattctgtttccgctatgtatatcctgccttccgacaaggaggctgtggtacaggtaggctctaccacggtcgttgaaatgcacaatgagctgagagatacaccgaaaaccggagataacagcaaactcggtctttggcttactcttgcgggcgtatcggtagcaggcattgtgacttgcggaatcatcggttttaagaaaaagaagaaggaggataactgatggaactgaaagcgatcatcggaattgctttggtcgcctttatcgtaggcggctttatctttttgcagatccgtaacagaaagaaaaagtaagaacttctgcggggcggggcttaaaaactccgccccctttttctattttgggaggcttaaatgagaaacttgaaaacgattgaaaaccgagtgcttgcggtgttaaaggaacaccccgaagcacgaaatgacgatatgaagctgtatttgcttgtcagcaaggcgtgtatctatgatacccacggtatcagccatttcagctttgaagatgtgatgagcaattacaaggcttacggtatcccttgttttgagagtatccgaaggacacgacaaaaaattcaggcaaaataccctgaacttggctgttcccccgaagtgcgcagagcaaggcataaaatgcagcgtgtctattccgactacgctaagagctaagacaggaggtaaaagaaatggcagctaaaaaaagtacaaataccgctttgcagcagaaagtaaaggtgcttgcaaaactttacgattcaggctgcaaaactgaaaaggacttgaaggcgctgagcctgcaaagtattttgaaaatccccgatatttccgtttccgatatgacggttattacagagcttcaggagcagatcgcaaaaaacaggctcttttcctatttgggaggtgctgatgatgagcagaagtcagaggaaaacacgatttagataaaggaaaggagcagacagaaatggcttttacaattcgagcgcttcattctgacgagcaaaaatacacttacaggcaaagtacgcagatcgagggacagaccggaagtatcggttatcttcgtggcgacttcggcgcaggcggcaaagagttcttttcctcttggtttgaccacaggcgggatttgaaaacagatgagttcaaaagcgctctggacgaggttatcaacgcccttcgttccgaagaatatgggctgttaaagagccgcacggctatggcgcagtatgcggcgaaatatcccgccagcgcctttcaaggcaactatgcgaccgagtacggtttccgtgccgataccgaaaaacacagcttcctgatacggtgcaatcctgcccgtggggactacaatttttactgctactgctatgtgcaggaatggcttgaccgccatatggaaaaggcgagccgtggaatctgctttattacgccggattacaaagaaaagttcaaaatccccgatggagataaaattcgcattatcctgagtgacggagaacagcttgaccgcacctgccgatatattgacgactatcatttggaagttggcagcaatctctatcacatctgcgagtttgccgagcggatggagcaaaacggcaataccgtgatcccgctccgttcttctctgccggagcagtgttatgtgttcgtgcagacggaaaactgcgtcggcattgtcaaaaagggcgaaagcggattttaccgcacggatattcagggcggcaagcccagtgaaacaaacgcccttgtgaatgagatgaacgaaaagctcggcttgtcaaaagggcaggcggaagcaatgaaggcaggttcaatgttcggttgggatacccctgccgccgatccgaaaagctatgataaaaacggtattcccgtaaaaccgaaacagaaagactatgaaagataggaggtgcataaccgatggcacgaaagtacgacctgatttccgagctgtaccgccgtaccgcacacgctgttgtttccgatattcagaactggcaagcctttttgcgctgcgcctgccggaactatcgtctgcgctttgacgagcagcttctcatctacgcccaaagaccggacgcaacggcagtgctggagatcgagcgctggaacgataaatttgggcgttgggtaaaccgtggcgctaagggtatcgctgtatttgaggacgccgaccggagcaggcagcgcttaacccattacttcgatatttccgatacccacgcaagccgctattcccgccccgtcccgatttgggagatgaaaccggaatatacggacgatgtgatcgaatcccttgaaaacaccttcggcgagctggaaaacagggaaagccttgcggacgcagtgctgagcgccgctaaaaacgccgtggaagataatattcccgactatttgggcgatctgatgtatgccgcagatgacagcttcctctatggtctttcggaggatatgattaccgctatgtataaaaaggcggtaacaaacagcgtagcgtatatgatgatgacaaggcttgggatagataccgagccgttttttgaagcagaggatttttccgttatcacaaatttcaatacgccggaaaccttaaacgccctcggtattgcgtcaagtgatattgcggagatggggcttggggaaatctcccgtaccgttcttgcccttgaaaggcaaaatcgcatcattgcggacagagagaaaccggaatacaataaggctgaaaataaaagcgaaaggagctttgaaaatgaacgagctgacatacacaatgcagggcgattacaatcttcccgacctgataatgcccgaacagccggaagtgactttgggcaggtacgctcagatgaggcggaattttctcaaagaacatcacaaaatccgatactacaatcttctgacaagctgcaccctgacacagcatttggcggaaaccgagcagacagcgatgaagctggaagaaaccctgatgaagcagatggcagcgcaggagggcttgaccgagagcctgaaagcggcggatatgatgaagtgggtgcagggaatgaacaatctgcggaacagagtgcaggagatcgtgaaagcggaggtcatcttcgcttagattattacgaccgaagcaacgaggacaagagcctgccgtttttcggcggggacgataccattcgtgaaatcctcggcacaacgccccacctgaaagcctcaaaggatgagattcgtgctttctatgaaagcaatcccgataatgccgcccgtaccgaatatatcaagggtattttcaataacgactatactgaactgattttgagtgacgggcggcaagccggatacaaaacttggcagaatgtgcttcagctttgggagggcagttatctgtcccgtacaaagcagagcttctatgattggggcgtgatcgcacagcactttgaagcaatgcggctgctcggcgaattgcaggatacaagaaagccgcttccgtctatggacgggcaactgaactttttggatatgcaggcagaggaaaaaacctctgctttttctttttctcaggagattatcgacgctgttctcacttgtggaagcggcgtatcggagggaaagtttcgtatctatgaacagtttgaaaagagcctgtctgcaaaggaaaatgccgattttctgaaaaatgaatacggttggggcggcgcttatcctgctattgtcggcgcaggcattgatgagcagcatgacggaaaaggcattttgatctcaaaaggtatcggcaatgacaagccgcatatccggctgaattggactcaggttgagaagcggataaaggaattgatacgcctcgaccgttatctcaatccaaaggaaaaagagatttacccgcagtggcttgaaaagcaggaggaaagccgagcggaacttgccgaaaaacagagaaatcgtgaaattctctcctctgctccacccaaacaggaaacggtgcaggcagctgaaagcgagccgcagaaggaagcgcagtatgcctatcatctcggcgatacggtatatatgggcgctgacgaatatgaaatcctttcctttaacgatgagcgtgttgtgctgcacgatatgcagtatccgctattccaaaaggaattggaacgggctgagtttgaccgcagggtgcgggaaaatccgatgaatgaccacctgaaggtcaaggagttaccacccgaagaaaaggcagacgaagcgccagcctttgacattggtatggggtatctcggaaacggtcttaccgtttggaacagagccgtagaagaaaacggcgattatcagacgattgcccatatcagcagtgagggcgaaatccattactatgtggacggtctgcctgaagatgtggtcgcaaggattgagcaggcggcggcacgggagcagcaaaaggctctgtttgcagcctcatatcaggtgggcgacagagtgtatttggacggaaagccttttgaaatcacacgggtagatgactggaatgtcgaactgatggatcgctctgtgcaaaatccgcagccccgtttggagcaaaaggacagctttatgcgccttgttcagcgaaacgagcgcagcagctttacggacgcttaccgtgagtacagcgaaatcaaggaagataatcccgatagccttgtgctgtatcagatgggcgctttctttgaagcctacggagaggacgcacagaccgtcagcgaagcgctggaattaaatctgacttcccgttctgtcggcggcaatcagcgaacactgatgtgcggctttccggcaaaccgcttggaaacctatgtcaatatgctgcttgaccgtggctttgatgtggcggtctgctctttggaaaacggagagcgcagcacccgaaacatcgtatcgaccaataaggaagatccggtgcagtcacagccggtcggcaggatcgactatctgcatacggacgggacggtgcgggaaagcgttgaatacacaagcccctatcagtttgaaaaggatataaaggaagaaaattactacggcgttccttttaccgtcgttttctataaggataaagacgggaacaccataccgcaggattttatcggcgagcttgatccgccgccgcagggcatagaaatcattgattcgccctatcttgcaaaggacagggcagatgaaatgctcaggcaggcggagcagattgcggcagaaaatacgcttccgcccgacgagagatttttcgtcattgaaactgatgacggctatgccatttgggacgatctgacggaagcgatctatatcgacgatgaaggcgtcagcgaggagtttaagagcgagtggcaggcaaacgactacttggaacaggtcaaaaaatctgtttccgaaaaggaagctgccgaatggctttatgtggaacgggcaaagcaggacacatccgctaagcagcctgagcagaaagaagccgagccattcacgcctgctttcagccagccgaagcgctcacgggtacagacctttgatctacaccctgaaatcccattgtccgaacggcacacctttgaccttgcttcccacgaagtgccggaggctggcaaaaaagaacgcttccgcaggaatatggaggcaatcagggtgctgaaagaatgtgagtttgataaccgctttgcaacgcccgaagaacaggagatactctcacagtatgtcggttggggcggtatccccgaagccttcgatgaaaacaatccctcttgggcggacgagtttatcgagctttacaccgccctttctcccgatgagtatgaaagcgcaagggcaagcaccctgaccgctttctataccccgcccgttgtcatttccgcaatctacaaggcgatggagcagatgggctttcgggagggcaatatcttagagccttcctgcgggatcggcaactttatcggtatgctgcccagcacaatgcaggacagcaaaatttacggcgttgagattgataagatttcggcgggaatcgcacagcagctttatcagaaaacctcgatagcggcacagccgtttgaggaagcaaatatccccgacagcttttttgacgctgtgatcggcaatgtgccgttcggcgatattcgtgtcaatgacaggaggtataacaagcataactttttaatccacgactacttttttgcgaagtccttagacaagctcagaccgggcggcgtgatggcgcttatcacgagcaaaggcacaatggataaggaaaatcccgccgtgcggaagtatatcgctcaaagagcggatctgctcggagctgttcgtttacccaataacacctttaaggggaacgccggaacggaggttgtttcggatattctaatcctgcaaaaacgggacaggctcattgaccttgagccggagtgggtacacctgaacaccgatgaaaacggcgtgaagatgaacgcctacttcgttgatcatcccgaaatggtactgggcgtttgggcaaccgtgcccggcagattcggcgacgaagataccgttgtcccttatgaaaacgccgaccttgccgagcttttggacgaagcaatcttcaatatccacgcagagattacggattacgaagtggacgaggaactgaccgaagaagataactccattcccgccgatcccgaagtccgcaacttctcctatacggttgcaggcgataaaatctattaccgtgaaaattcccgaatgacgccggtggagtgttcggctacggcggaaaaccggatcaagggtatgattgccatacgggacagcgttcgcagcctgattgaaatgcagactgctgattatcccgattatgaaatcgaaaaggaacagcagaagctaaatacgctttatgataacttctccaagaagtacgggctgatcaattcccgtgcgaatgtgtccgctttttcgcaggacagctcctttgccctgctttccgcactggaggtgctggacgaaaacggagagctggagcgcaaggcagatatgttcacgaagcggacgatcaagccccacacccccattacctcggtggataccgccagcgaagcgcttgccgtatctatgggtgaaaaagcctatgtggatatggaatatatgtgttcccttacgggcaagactgagcaggaaatctatgaggaattaaaaggcgtcatcttcctaaacccgatgtacggctacggaaacagcaccgagcaaaagtacctgatggtggacgaatatctttccggcaatgtgcgggaaaagctcgcttgggcgaaaaaatccgcagaagtctaccccgaagattacaaaatcaatgtggaagcactggaaaaggtacagccgaaagacctgaccgccagcgagattttcgtgcagctcggcacgacttggctgcccgaagaaatcgcacagcagtttatgtatgagtttttggatacgcccgtttatgcgagatggaacatcaaagtccattactcaaagctgacgggcgaatggaatgtggagggaaaatcctacgaccgtggaaacctgaaagcctacaatacctacggcacaaagcgtgtcaatgcctacaagattatcgaagatacgctcaatatgaaagatgtgcgtgttttcgactataccgaaaatgatgagggcaaaaagagagccattctcaataaaaaggaaacggctatcgcccagtcgaagcaggagctgatcaagcagggctttcaggattgggtatggcgtgatcccgcaagacgggaaaagctggtgcggctgtataacgacaagttcaacagtatccgtccccgtgagtatgacggaagccatatcattttcagcggtatgaatcccgaaattgagcttcgggaacatcagaaaaatgcggtcgcccatatcatttacggcggcaacaccctcttggcacacgccgtgggcgcaggcaagacctttgaaatgactgccgccgctatggaatccaagcggctcggactgtgcaataagtccctctttgtcgtgccgaatcacttgacggaacagtgggcggcggagtttttgcagctctatccggcggcgaatatcttggtggctacgaagaaagactttgagatgaaaaaccgtaagcgcttctgcggcaggattgcaactggcgattatgacgctgtgattatcgggcattcgcagtttgaaaaaatcccgatgagcattgaacggcagagggctgttttacagcagcagcttgacgatattatcgaagggattgcggatgtaaagcgaaaccgtggcgaccgtttttcggtcaaacagcttgaaaagacgaaaaaatccctgcaaacgaagctggaaaaattaaacgatcaatcgagaaaggatgatgtcgtaacctttgaagaactcggtatagacaggcttttcatagatgaaagtcattactacaagaatctatatctttacacgaaaatgagaaatgtgggcggtatcgctcagacagaggcgcagaaatcttccgacctttttatgaaatgccgctatcttgatgagattaccggagggcgtggcgttgtgtttgcaacgggtacgccgatttcaaactcaatggtagagctttataccatacagcggtatttgcagtacagaacgctgcaagaacacgatttacagcactttgacgcttgggcgtcgatgttcggagagacagtcacggcggtcgagcttacacccgaaggatataatttagtaggacgataaataatgcgttcctaaattgaaaataggctatcaaaatcggttttggaacttcaaaaaaatcttttaattttcttgaaaaacagttccgctttgcacccctattttctcctattagcagagggagtaatccctgtaatgctaaatcagattacataaagaaaggaggataagagaatgtcaaggacttcaaagattacagcaatttatgagcgtttatcaagagatgatgacctcaatggtgagtcaaattcaatcaccaaccaaaagcaatacttggaagattacgcccgaagaaatggctttacgaatatccgtcattttactgacgatggtttttcgggtgtgaatttcaatcgtccgagttttcaggagttgattaaggaagtagaagcaggaaatgtcgcaacgattattgttaaggatatgagccgattaggacgaaactatctgcaagtcggcttttatacggaagttctgttcccacagaaagatgtccgttttcttgcaataaacaacagcattgacagtaataatgcttctgataatgactttgccccatttttgaatataatgaacgaatggtacgccaaagacacaagcaataaaattaaggctgtgtttgatgctcgtatgaaagacggaaagcgttgtagcggttcaattccctatggatataaccgattagcaaccgacaaacaaacgcttgtcgttgaccctgtggcttctgaggtggtaaagcgtatctttctgcttgccaacgagggcaaaagtccgagagcaatcgctgaattgcttaccgaagaaaaggttttaattccggctgcacacgcaaaggaatatcaccccgaacagtataatggaataaagtttacagacccgtatctttggggaatgtcaaccataagagcgattttaagcagacaggaatatctcggtcatactgttttgcgtaaatcggtcagcaccaatttcaaactgcacaaaagaaagaataccgatgaagatgaacagtatgtattttataatacgcacgagcctatcatctcgcaggaactttgggacagcgttcagaagcgaaagaaacgagcgaacaggacagcagccaaaggtacgcatagcaaccgtttaagcggttatctgtactgtgcggattgtggcagaagaatgaccctgcaaacgcattacagtaaaaaagaccgttcggtgcagtattcttaccgttgcggtgggtatgcaagcagagtaaactcctgctctgcccattcaattagtgctgataatgttgaagccttgatattatcggctgtcaaacgattatcaagatttgttctgaatgacgaagaagcctttgcaaaggaacttcaagcactttggaatgaaaagcagacagaaaagccaaagcacaataaatcggaattgcaccgttttcagaagcgatacgatgaattgtctaaacttattcgtggcttgtatgaaaatcttgtttcgggattactgcccgaaagacagtataagcaactgatgaagcagtacgatgacgaacaggctgaactggaaacgaagattgaggaaatggaaaaggaacttaccgaagaaaaagtaaatgctgttgatattaagcatttcatttctttaattcgcaagtgcaaagagccgacagaaatttccgatttgatgtttgctgaactcattgacaagattgtggtttatgaagcagagggtgtgggaaaagcaaggacacaaaaggttgatatttacttcaactatgtcgggcaggtcgatattgcctatacagaagaagaacttgctgaaataaaggcacaggaagaacagattgagatggaacgcttggcaaaacagcgtgagcgtgaaaaagcctaccgagagaagcgaaaggcgaaaaaactcgctgaaaacggtggagaaatcgtcaagacaaagatatgtcctcactgtcaaaaagagtttgtgcctacaagtaaccgacagatattctgttcaaaggattgttgctatcaggcaaggcaggataagacaaaagccgacagagaagcagaaaaaggaaatcattattatcgtcagcgtgtatgtgctgtgtgtggcagtacctactggcctgcacacagtcagcagaaattctgttccgaagaatgtcaaaagcaaaatcacaacgagaaatctttggaattttatcacaagaagcgaaaggagaaatcagaatgcaaagatttattacagacgaaagaactggtatccagtacgaactcatcggagattattactatccctgcttgacgatagaaaacgaagaaccgcctacgctcacaaaatacggaagaatgagggaaagatatttgagggagcataggaaagtcttatattgcaatctgcttacaagcggaaagttatatgaacaccttgctgaaattgatacttcggcgtgtaatatggcggagtatctgataaaggaaatggcaagaaaacaaggtgtgacggaacaactgaaagcggaggatatgatgagatgggtcggattgatgaataatatccgagcctgtgcagatgagattgtattgaacgatattgtgtattcctaatagcataccagccgaaaaggaactgctgtctttactgatggcagttttctttttcgggaagtattcaagaagtcattaagtcgtgagtgtaatggaagtggttaaattgaaagttcataaagatggtatgatgtgttaaaatgagagtgatgaattgtaattttccgcattgaatattaagagacttgtaggtgtaagccttttgctgttttattatattctttcaaaaaatgaaagctaatctttgaataaatattttttgaatttaagtgacgcttgacacatttttcccgtttattagggtgaaaggccttaatacaagggaaaggaggagaagcctatggatgataagcagatattagatttatattgggagcgctccgaagctgctatatccgaaacttcaaaaaaatacggaaagtattgcagatacatagcctttaatattcttcacaatgacgaagatagcgaggaatgtgtaaatgatacttatttaagagcttggaacagcataccgcctaaccgtccatctgtcctaaaaacttttttagggaagattactcgcaacctatctttggacaggtacgaactgcttaatgcaaagaaacgtaatggtgggcaaatgccattggtttttgatgaaatacaagagtgcataccatcgttggatagtacagaaaacattgttgaagaaatcgctctaacggatattctcaaccgctttctttcttccctgtcattagaacagcgaaaaatctttatgagaagatattggtatttatcgcccattaaagaaattgcaacggaatatggtatgagcgagagcaaaatcaagatgtcattatttcgttcaaggaacgaactcaaaaaattgttagagaaagaaggtatctctgtatgaaagaaaagaaacttttaagggcattgggaaatgtcgataatcagtatattaaggaggctgaacctatgaaaaaaacaagtaaaataactaatcggcaaaaatgggtgtctgttgcagcttgcttcgtactcgttgctgtgattggagtgggagtttttcaaagcaatctgtttggtacaaaaaacgatattgccacgctgaatgatggagaaacaattacttttgttaaaaatgacttatcacaatcttcaattaacttaaatgtaacaacaagacctttgagcgatgctgaaattgaaatgctttttgcagacttgcctgttaccgcagatgcttattttgatgctgacaatcataatattctgggttttgagggaaaaattgatgatacaagaatggtagtttctaaacagggtgtaaatctattagatactatcattgatggaaatacaatcacttcaagtgtagacggcgttgatatcaacgcaggatatttcgtaacaaagtcaaatagtcaaggtgtcaaaaccgtaatatattatgcaacctttgatatgggagagaacactatttatgtagagtattctggcgttgaaaatgaaagtgaaactgtaaaaaacaacttggcagacacaattttgaagttgattgagaacggtgcatttgatttgagccaaatccaagaataatctgcaaatttcatatactaagaacttgatgtaacaccctatacccttaaaaaatagggaaagtaatataaagccccaaaaaacaagtctaaaaagctctattagaacggtatcttcgctttttgcctgttcttatgattataattttagtggtcacgttttttgctacttgaatgacagaaaacatcgtagaaatacggtgttttttgttgccccaaaccctacaatttcatacataaccacaggttagtacaaataccttgcgtgatttttttgaaaggcttagaaaggcaattttgcccgattttcgccccgaaaaatgacagaaacaaggctctgagtatctttcctgtggtttttttattttcagacggaaaggaggattgatatgccgagaatgagtaagaaacggaaacaagattgggcattgtttctgaacgaaagaaatcgcattacctacaacgaactttgcagaaaatgcagtaatgactgcaagcagagtttccgttgtatcgtggtgctttgccctaagtatttatcgaaaaggagaacgaagaaaaatgaagcaaatggaaaatgaaatgaatgtaaatgtccctctcgaagttattaaggcaagtgagattgagccgaaggaagtgaaatggctgtggtatccgtatattccgtacggcaaggttacgctgttgcagggcgatccgggcgatggaaaaagcaagttaatgctgtcaatcgccgcactgctctctaagggcgaacctctgccttttactgaaacggaagaaaatgagcctatgactatcatctatcagacaacggaagatgatgcagacgatacggtagtaccccgatttaactctgccggtgggaacggagaaaaccttatcttcatcaaggaagatgaaaagtctttatcctttggagataaccgtattgctgaagcaatcgaaaagtatcacgcaaaacttttaattcttgacccgatgagttcctatatcggagagaactgttcaatgaacaatgccaacgaaacaagggcagagtttaatcacttgattgcagttgcaaaaaatactggctgtgccatcgtgattatcgctcatatgaacaagatgagagataccaaccctctttatcgtaccaacggttcgattgatattgcgggtgctgcaagaagtatttttgcaatcacacgcacaccgaacaaagaagcaccggcggaaagatatatggttcaagtgaaatccaaccttgccccgacaggctctgcaattctctttgaggttgcagaaaagggagtggactttatttctgaaatggaaatgacagcagaagaagcgttccagtcccttgcccctaaaatgggcagaccgaacgaaaaggaaaccaaggcgaaagaatttcttttggaaatgctgaaagacggagaaatgctttcttcggattgcgaagaaagacttgaagccgctgggttcaaaaaatcgaccatcaaaaaggcaaagaagaaagcagaagttatctcccaaaagaaaggctttctgtggtactggtctttgccgatgggcgatataccgagagaataaaagcaggctgtctgatgggaggacagtctgtttttatgattgaggtatcaaaaggaggtcaagggggaactcccttgcccacgacatctttgcagacgaagtctgaaagtgtcatagtgggttacacacattcaaagaatgttgtgtaatggcttcgcccctgccgagaaaggagagcaaaatggcaaaaatcgacaaggcggatatgagttgtgcaagggtaaaacagtacaccgcttctgatgtgagcaaggcggaaaggcacaacgaacgcaagaatgaaacctacgaaaatatgaatgtgattgaggaacgaataccctttaatgtgcatttcaaaaagccgactgcccctacctatatggaacagttaaaacagatggaagcagacggtcaggtgtcgcttcgtgggttgaggagagacgcaacactctttaatgagatagtgattgatgtgaatacgatgtacttcgagcgtaatggtggctatgaatacgcaaagcagttttatgaagaagcctatcgtttcatcgtggaaaaattcggtgctgacaatgttatatcggcagtaatgcacgctgatgaaatcaatgtagccgcaaccgaggaactgggaaaagaggtttaccattatcatcttcacgctatggttctgccagtggtggagaaagaaatcctatggagtaagcgttgcaaagacgaaaaactgcgaggaacggtcaaggaagttgttaatcagataagccattcaaagaaatggaaatcggatattccgctgaccgatgaaaaaggaaagccgcttcttaggaagaacggaaagccgatgtttagagcttcgtacagcatactgcaagatgaattgtttcactatatgacggagcaagggttcaaaggctttcagcgtggcgaatacggaagtacagcagagcatttgacttccctgcaatatcaaatccaacaggacaaagagcgattggagaagttgcagaagcgtattcaaaaggaacaggtcaagtatgagcctgcccgtcatatctccaaaaccttaaacgagattgacagtatggggcagaaaacaatcacaggtaaaatggcaatctccaaagaggattattctcaactgacagcccttgccaaagagggtattaccagtcgtgcggaaatcaaaaaatttgagcagagtgcaaatttttaccgacagaagtatatggacagtgcaaacgcattggaacgaatgaaaaccaaatacaacgaactgaaagaaaagtgcagaccttttcttgaagcgttggaacatttccccgaagttgctaaactttttaccgaaaaagtgaagcaacttttttcttttaaggaagcacaggaacgagccgaaaaagaagcaagggaaaaagaaagacaagagcgtaccaaggcacgaagaaacaagcgggatatggagagataaccatttccattatactcacgacttaatgacttcttgatatgttccgatgaaacaggctgtatttgtggggtgttccaaacggaatgccccaccagtcaatttatgaaaaggagaaacggactatatgaaagaaaacactttatcttatacaacacgaataggcaaaacaacttttattgtcaatgtgaagcaatcggaaagtgcgaagaagcctttgaatacggtgtttcaagaaatatgcagacacgagatgttgggagatttttcagcggataaatatttgaatttagaaaacttgcaaaaatcatcttgacaaactcgttcccgaaggaacaggataccgggcgaaaacacgctttgcgaaattcaataacctgcccgaactgatggcgatgttcaagcaggtggcggacatcaaaacggcggatatgctcgatcttcccgtaccggaagtggagtatcacaatatcgccgtgaagccgtcacaggtgcagaagaaaatggtcgcctctctcggtgaacgagccgaaaagataaggggcggcaatgtggattccagcgtggacaatatgctgaaagttacaaacgacggacggaagctcgcccttgaccagcgaatgatgaatccaatgctgcccgatgaagaaggcagtaaagtcaacgcctgcgtgaatgaggtttatcatatatgggaggaaaacagcgataaaaagctgacacagcttctcttttgcgacctttccactccaaagggcgcaggcgaattttccgtctatacggacatacggcagaagctgatcgagcgtggtattcccgaatctgaaatcaagtttatccacgaggcggataccgaaacgaagaagcaggagctgttcaaaaaggtacgccgtggcgaagtgcgaatcctgatgggcagtacgcagaaaatgggtgcgggtacgaatgtgcagaacaagattattgcttcccacgaccttgactgcccgtggcgacctgccgatctggagcaaagagccggacgaacagtgcggcagggcaacgaaaacccgaaggtcggtctgtaccgctatgttacggaaggcacttttgacgcatactgctggcagctcgttgaaggcaagcagaagttcgcaagtcagattatgacgagcaaatcgcccgtgcgttcctgcgaagatgtggacgctactgctctttcctatgcggagatcaaaatgcttgcggcggataatccgcacattaaggagaaaatggacttggatattcaggtgcagaagctgcgccttttgaagtccaattatctctccgaaaaatatgagctggaggacaaaatcatcaaatattacccgacaacaatcgcccggataaaagagacgattgcgggactggaaaaggatagatcgattgcaaaagaacacccgaagtctcttgacgatacctttgtagggattgaggttaagggtgtttcttattccgaaaaagcggaaggcggtcagaaaatcattgacgcctgcaaggagatgacctcgcctgatcccgtccctctcggcaaatacaggggctttgacttggagctttcctttgatacctttgagaaagcctatcaggtaaaaatcaagggcagcctttcccgttctgtctctttaggcacggacgccatcggcaatattacccgaattgacaatgccattgagaaaatccctgaacggctggaggcaaaaaacagagagctttcaactcttgaacagcaattcgccactgcgaaagcagaggttgagaaaccgtttgacaaggaagaagaactgaccgaaaagacaaatcggctcaatgtccttaacggcttacttaatgtggataagcgggaaaatgagctggtggacggtgcgcctgatgagggcgacagcgtacctatcacaaaggaaaaagtctacgagagataggctttttgcggtatgggaatcatctcataccgcctttacatatcacggcaaggtggaaaaagacacaattctgtgatataataatcaaaatacaaattgatatttgtgtaagcaaagcgggggacttaaaatgcgtattttggaatatggcaatacaaataatccaacaataatgcttgttcatggttttgaaagtccatatcaaatatggattgattatatagagcattataaagagaactatcatattcttgtgccaattttgcctggacatgatgtgcaggagaagtccgagttcaattcctttgatgatactgcaaaagagatagaaaattattgtatatcaaaatctattaaccatatatacgcaatttatggaatgagcatgggtggagttttaacatcgtatttatggaaaaataagaggcttacttttgaaaaaatcattttagaaagctcaccacttttaccatttggaaaatatatgactcaaatgcttacaaagcagtacttgtccataacccaaaaagcaagagaacgaaatcaaaaagtggtacgaaacgcaataaattcaatggtaacagaagatatgctggatgtgtttttagaactgttggataatatatcagatgaaaccataaaaaattatttatatgcagttggacaatttaaacttccctcaaatattgacacacctaatacacagattatttatttttatggtggaaagataaatgaatttgtttttagaaatgtagcaaaatatatcaagaaaaattataaaaattctacaactatttgtttaaaaggaaagggacattgtgaggacgcattactgcacacaaatgagtggattgaacgactggataaatatattatctagtactacaaatcctaagttgtcgagataaatggcttacagcttgcaaaacaaatcgttctaaaaactgaacatcttttttacatagccgctcggttttacaaaaaatcaggcggctatatctatcacggcaagatggaaaaagacagagtaaagtgatataataaagtgtctctttgagagtcaatgtcaagaaaacggaggttatttgcctatgaaaaattgagaggaatttcctctattactcctgatttgtttgacctttgttatgacataattaaaaagagattttagattgcacagggctttagcaacagcgagttgcttgtttggtagatttatctgccttataatttgttacaaggaggtgatttgtagtggagacaaaagatgtcatacttgaactccggacaaaaaaaggactgtcgcaagatgaacttgcagaaaaagtttatgttacaagacaagcagtatctcgttgggaaaatggagaaacaatccccaatacagaaacgctaaaattactttcaggtttttttgatgtttccatcaatacacttttaggctctccgagacaactcatttgtcaatgctgtggtatgccgcttgatgattccacgatcagtaaagaaccagatggtactttcaatgaagaatactgtaaatggtgttatacagacggaaaattcacatatgaaaatattgatgatttaattgctttttgtgttgagcatatgtcaaatgagaattggtctgctgaacaggtgcggggatatatggcggatatgctgcctaaattaaatcactggaaaactcaagagaaaatcaaataatcatcaattttatacttagataacttttacatagccgcttggtttttatgaaaaatcaagcggctatatttttgcttaaggaggtgttcgctatgggcgaaacagactataacgctctgctctacgacaagatgaaagctgagcaggacaagtacagggactggctgcttaatcagccgccggaggaaattctgaatcatacctatgagtacacgatgagagaggacattgtggtgtgtatggaggaactggagctttctccgaaacaggcaaaggcattgctccgctccccctgcccgcttgctgatgtctacaaggagtttatggacagggaagtggagcatatggataccattcgggattccattgaaacgagggcaaacgatgtactcaaacgggacaaaaacagagaaagcaggtaagaaaaatggtacacaaattaaaaacaatccgtggggatatgctggtacttcaatgccagcttgaaagagaattgatccgttatgtgcggaggtatctttgccagccgcaggtcacaatcatcacaaacgataagcagtttgcctttatgtgcgagctgtacgactatgtggagaatacggagcttccgccggaaatggtaagcgttctattgacaactaaaaatgttttggaactgtcttgggacgaatggatgatgaatattgaggtagacgatatggaagattccattgagaaagtcgctgagcttctcaaggaaaggaagatttgatatgccatatgttgagccggagattattgaacaggtgcggcaaatagatctgctcacttatctgagaaagtttgagccggataatgttgaggaggttaaaggtacgaaaaatgtatatcgtaccgttgaccacgacagcttgaaaatatccaatggtaaatggttttggtggtcgcaaggtttcggcggttataatgcgcttgactatctgataaaagtcaggaactattcttttatggacgcagtggaaatccttacgggaaaagaactggcaaattggacgccgccaccgaaaaaagaagaaaaaactgagccaaaggtactgcgcttgccggaaaaatatcaagacagtaaacggataatacagtacctttttaatcgtggcattgactatcagattattcaggagtgcattgcggacggtgtgatttttgaaagcaacgggcgctatcataatgtagtttttgtcgggaaggacgaaacagggacgccaaagtatgccgcttaccgtggtttaggaagcagtacctttaagggagacgcatacggaagcgacaagcaatattcctttcgcctgcttgcaaaagagccttgccagtcggtgcatttgtttgaagccgccattgatttgctgtcctatgccactttgctaaaagctcagggcaaggactacaaagcagaaaatctgctctctctttcgggcgtgtatcagccgaagaaagagagcaaagacagcaaaattccgattgcgctttccgttttccttgagaaaaatccacttatcaagacgattcatttgcacttggacaatgacaaaacgggaaggctctgtgccaacaccttaaaagaactgctcagaaacaagtatgaggtctttgacgagccgccgaagaaaggcaaggactataacgattatctctgcatacagcttggaatctacaaatccaaagaaaggagctatgagcgttgaatgtacgaatttatcagatcaatatgaagcgtgacgccaacaatgtcgcctttatgaattatgagagcctgcccaaatttcagggcagctcagaaatcgacagcagcctctatgataaggtgttcgagggagaagtaaactgcttcacgctggaaaaactctatgagattttcaatcttaaacaccccgcaggctataaagggcggtcaatgtccgtatccgatgtggtggagatcattgacgggaataccggaaaaagctacttccacttttgcgacagctttggttttcagaaggtcgattttgagccggaaaagacgcaggtcagcgaccgtttcctatcgcttgccgagcaggagaaaatctctgtcctgctcgttccggtcggtaaatctccgattgtgaaagagataccgaacacctatgaagcgatgaaagcgctggtcggcgggggcggtttagacgagtatatgccctttgaagatgacgctgctatcgtctgtaaccgtgacgggaaacaggaaaagctgccgatgaatcgggcggtctaccagccgccgaagcgcacacagatgagctacagcaaactgaaatccctttttcgggaagcggaaaacaacagacagcaccttaccgcacatatcgtttttaccgccgataccttcaaaaagccgtacagcgagtttgaacggacttatgaagtaagctcggacaacaaggcgttccagtcccgtatgggcggctattccatctacggcgcttctctggacggtgttgatccgtgcctgagaatggagggcttgatggcggacgaaatgggcggaaaggacggttggaaaattgaaaaatgcttcttaatggaagattcaagagaggtcgccgacatcattcacggcgatttttttattgcccgttccaatgtcggcgatgagaaatacagcagcttatcgagcgagcaactactgaaatacaaacggctttttcggtatcctgagcgattccacgaaaccgcacacgggattgagatcgagccgttcaagcccgacagggcggacaaagaacgataaatatcaggaaaatacggggcagcccgacaggtctgcgttagcttagcgagcagactgtttgtatccccaaacgggattcaaacagtaaaagctcgttaggggctgcccctaataccccaatacaggaaaggattttgactatgcacgaatttctattctttatgataggcttcctgctcggcggcgttatcggtatctcgataatgtgccttatgcagatcaaccgaatccacgccggctctaacgcccgaaaggaggacgatgagaaatgaggaagcgaaatgtagacaagcatatttggtttgaccgtcaggaagctcaggacttgcagaagaaagcaaagaaagcctgcctgaccgaagcggcgctgatccgtctgctgattcgtggctatgagccgagagaaaaaccggacgagagattttatgacgctatgcgggagctttccgctatcggcaacaacatcaatcagctcgccattaaagcgaacgccctcggctttgtggattcgcaaatgctgaagaacgaggcgctgaggtggcacaagtttcaggcggcgattgagcgtgaatttctgcgccctgaaaaaagcggtctgaaatggcagtaacaaagctttggaaggtaagcgtccggctcggtcaggtactggactatacgaccaatcctgaaaagaccgctaatcccgaatactctgccgaagattatcaggcgctcaaagatgtgcttgcctatgcaaaggacgaggagaaaacggaacacgagtttttttgcgacgggatcaactgtaatgtggcgatggctcgtgaccagttcattaccgtcaaggagcagttcggcaagacggacgggattcaggcgtatcacgggtatctgagctctaaggaaaacgaggtcacgcccgaacaggcgcagcagatcggaatggagtttgcaacaaagatgtggggtaagcggtttcaggtggtcgttactacccacctgaacacgaaacatctccactgccattttgtcatcaattccgtttcctttgtcgatgggaagcggctgaaagataaagaaaagtcttggtattacttccgccatatcgccgacgagatttgcttggaacacaagctgtccattgtagagaagccggagctgcacagatcgcccgcctatcttacgatgaaggacgaggcgggtatgcccacccgatacaacaacgccaaaaaagcgattgacgaagcgattgcgatgagccgcaatctgcggcagttccaatatgagctgggcgtgatgggctatcactcgaattttagtcctaatcgtaagtatgcgacggttacacccaagggcagcgaaaagccgatacggacttaccggctcggcgaggaatacaccaaagagaaaatccttgaaaggctgattgctaatcgggataatatcgtgttcaagccgttccagccaaagacctatatcgtccggcagtaccgtctgcccacaagagaacacaaaatccaaaaggtcggcggtctgtatggcttgtatctctactactgctatcggctcggctaccttccgaagcacaatcagaaacaacagaatacggcgaggcttcactatcttctcaaagacgatttgatgaagatggacgaacttaccaaacaggtaacgctgctcggcaagcaccaaatcggtacggacgagcagctcttttcatataagcggtcggttgaggacgaaatcaaagcccttaccgccgacagaacacatctccgaaatgaaatacgaaaagtagatatatcagatgaacggctgtcggcggcaaagatgaaaatttccgctatctccgagcgcttgaaagagcttcgcaaagaagtaaagctctgcgatgggattgcaaagcggtcaggcgtaattgccgataccctttcgcaagtcaaggcagaggaagaaaaatctcaaagaaaggagtcccgaaactatgaacaacggcggtgacgcagcagaacaaatcgtcaggctttcgcttgaaggatttgaagtggctgtccggctcacaggctcggcggcaaagaatatcgctattctgttagcttccgtgctgaagcaggagatcagccagtcgaataagacacgggggaaagcacggcttaccaatatgattaagtccggcaaggagctgaaggtcttttcattccagcagaaagacttgccgaagtttaccgaacaggcaaaaaaatacggcgtcctttactgcgttctgcgtgataaaaataccaagagcgatacggcaatggtcgatattatcgcccgtgcggaggacgctgcgaaaatccagcgtatttctgaccgctttgaactcggtaaagtcgataaggcttccattgtttctgaagcggaaaaggctgtggcagaccgtgaagcggctgccaatgaagtgcctacgaaatcaagaggcgagatcatcgtggaagaagcgatgggaaagccaatgcagaaggagggaaattcccaccaaaacccctcggtcgcaaagacggacaaaagccctctgtccgagcgagacttagaaacgacaggtacgcacactgataagggtgtagcaaaggcagcagataaaaagccttcggttaaggaaaagctcgaccgatataaggcggctgccaaagcagaaaaggaagcagagcgtattgtgccggaggcttccaaagagaagccgaaaacccccgaagcaaatcggcagaccgttcacaggcagccgaaaaaatccaagaagccgaaagagaggtgagcgaaatggatcaactgaaggaacacccgcagatcgtggagctgttagacacgctcgataaaaacagcttgatgaaagagaaaaacgaggtgcagtcgctggtaagctatatcggcggtatggaagaaacgctgacagaaatgctcggcgagcttcaggatatgcgccgtgaaatcaatctgatccacaacaacacgctgcggagtaagtgccatacccttgtggaaaaaacggagggcaaaatccgtcagggattttccgcagtcaaaaagatgaaggacaatctgatccagtcagccgggaacgctgtgcgggcgttccgggaaagaggcagggacgccctcgccgaatcggtcagggcaatgaaaatccccgaagcgctggataagctgtctgctatgttcggcagaatgtcaaaggagatggcgcaggatacaaagaagctgtccgctatgcaggcggagcttcagggcgcaaagggacatttgaaaaatatggggctgctgtttatggggaaagccgcaaaggaggcggaacattccaaaacggataaaggcgtattatcaaagctgtcccgtttgtttgaaaaagcgcagaaaggatttgcgtctttggagcaaaaggcgatggatacggcggataaactcagagtttcccgtgtgaaatcgtctgtaaaggaaaatctcagcaaatacagggcggcggcaaaggcagaaaaaggaacagaacgcagcgagccgaccgtttccaaagaagaaaaccgcacagtacaggcgtcggggcaggtcaacgccccgcaccagcaaaaatcaaatccatcaaaagagaggtaaaaagatatgaccaacgattttaagagtaagcaaagcagcggcgcaagaccgccgagactttcgccggaggaatacgccgccaagaaaaaggcggagaaagaagccatttatcaactgctcgacaataccgcttcggaagtggtgcagtcgccggaaaaattcaaagcctaccttgatgtgcagagccgtatggacaggtacacagcgaacaatgcgctgctgatgtataagcagttcccgcaggcaagccagatcaaggagtttgacgattgggcggctgagggcgtaaaggtcaataaaggctccaagacctttattatccttgatccctacgagtataccaagaaggacgggacaatcggcattgatttcaacttgaaaagagtgctggatgtttcacagaccaacggcaagcgccccgccgccccgaccgctaaccgtgatccgagaaagctggtggcggttatgctcgacagcgccccgatcaatattgaaagcaccaatgagctgccttatcccgatatgggcgctttctataaaaacgaagatcagacgctttatgtgaagcgggacatcggcgacagcgttgccctctgccagtgcgtcgctcaggaactcggtcacgccgagctttctatgaacagcgaggtatacagccgcagagatatgggatttcaggcggtgtgcattgggtatatgctctgcaagaaatacggcgtggatacgcagaattttgcgattgaccgtatccccgacgaactgaaaaacaaagagccgaaagaaattaaagctgaactcggcaagacgcagaaggcgtttaaggaaattactgcccgtgtttccgatgagctgtaccgtcagagggcggaacgctcaaaggaacaggaaagataaccggaggtagctgtgatgaaagaagaactctaccatatcgctttggacgattatgaacacggcgttgtgattcgttccctgaacgataaaaagaccgacctcaaaaaagagggaaagtctactgacgccgttgacgatctgattatcaaaatcggtcacgccccaagacgcaagttcaaagtggtagaaaaggaatcctgccgtgaatcgagatagcggcaggcagtctgcgatcatccttgcggttatcgggattcttcccgttgtgtggctcggcttattgatagcaccgtccgtcaagggcggtctgccggagatactgccgagccttttgacggcattcaatgatccgttccatatcgagctttgcggggacagcttaaaaactgtcctcgttctgcttttgctctacggaatggggattggtatttatctgtctacacggaggaactaccgcaggcgtgaggaacacggctctgcgaaatggggcagcgcaaaagccattgataaaaagtaccgtcaaagcccgccctcggaaaacaagctgatgacgcagaatgtccggatcggactgaatgcgaaaaagcaccggagaaatttgaatactttggtgtgcggcggctccggcgcaggcaaaacgagattctattgcaagccgaacttaatgcagacaagcaatttctctcaggtaattttagatccaaaaggggaaattctgcgtgatgtcggcaatctgcttgaaaaagcaggctatgagatcaaggtgctggacttgatttcaatggagaaaagccattgttacaacccgtttgtctatctcaggaacgacaacgatattcagcgccttgtgaccaacctttttaagagtaccaccccgaaaggctctcaatccaatgatcctttttgggatactgcggcgagtatgcttttactcgcccttattttttatctgcactacgaagcaccggaggaggaacagaattttgcaatggtaatggaaatgctcagggcggcggcgattgaggacgaggaggacaacagaccttctccccttgataatctgtttgccgatttggaaatggataatcctgaacacattgccctgaaatactatcgttcctaccattccggttcggcaaagacgctcaaatctattcagattacccttgccgcaagattggagaaattcaatcttgaaagcttagcggcgctgacttccgccgatgagcttgaccttgcttcaatgggcgagaagaaaacggcgctgtttgcgctgataccggataatgattcgagctttaatttcctcgtcagtatcctttatacacagcttttccagcagcttttttactccgccgaccatatccacggcggcagcctgccgatacccgtccattttttgatggacgaatttgcgaatgtttcgctgcccgacgattttgacaagatactatctgttatgcgttcaagaggcgtgtcggtatctattatcctgcaaaatctggcacagctcaaagccctttttgaaaagcaatgggaatccatcgtaggcaactgcgatgaatttctctatctcggcggcaatgagcagagtacgcacaagtatgtgtccgagcttttaggcaaggaaacgattgatacgaacacctacgggaaaagcgagggacggagcggaaactactcgaccaattatcagatttccggtcgtgagctgcttacccctgatgaagtgagaatgcttgacaaccgctacgccattttgtttatccgtggcgagcttccggtaatggatttgaagtacgacattttgaagcacccgaatgtggcgtataccgcagacggaaaaggcggcgtgtatcagcacggcgaagtcacaaaaaatgtggcgaccattgaaaccctgtatgttgatctcgacagcgttcccgaaatggagctttcggaaacgacttacgagctgttgtccgatgaggactttgaaaacttaacaaattgattggaggaaaatagaatgaacatttttcataagacgcagaagaaagaaacccgcaaactgccgatgaccggaaaggtaaagaaaggctttcgttattactgtgctgcggttttgagcgtgaccgctgtttttgcgatgtctacaacggcttttgccgcaagcgatccgcttaccgttgtgaataacctgtccgatttcattttcggctttatccgtgcgattggtctgatcctgctcggttttggtatcgttcaggtaggtctttccctgaaatcccacgatccttcgcagcgtgcgaacggatttctgacgctggcgggcggcgtcatcattactttcgctaaagaaatcctcactctgattacgggctaacctttacgcaaacgacgctcaggggcgttcctgaaaaacaattcagggacgccccatttttctttataaggaggtgctacgaaattgagtgataactgggtagttcagaatctccagaacgccctcgaaacttggaatgaaaaactcgctgagatatggcagcttatcacaactacgccgcagagcttcaaaggcggcgggatatgggcagtcattgtcaatatcaacggcgctgtgcaggcgattggtcttgcgcttttggtgctgttttttgtggtcggtatggtacgcacctgcggcagcttcagcgatgtcaagaaaccggaacacgctgtcaagctctttatccgatttgcgctcgcaaaggcgggtatcacttacggtatggagctaatgcttgccctgttcaatatcgtgcagggtacaatcggtacgattatgaccgccgcaggctttacttccgcacagcagaccactctgccgcaggaaatgatcgacacgattgaaagctgcggctttttcgagtcaattccgctttgggcggttacgctcatcggcggcttgttcattacggttatgtcattcctgctcattatgacggtgtacgggagattttttaagttatatatgtatacggcgctcgccccgattccgctttctacttttgcgggagagccgagccaaaatgtggggaaatcgtttatcaaaagctactgcgccgtatgtttggaaggtgcagtgattgttttagcctgcattatcttctccctgtttgcttcttccccgcctgtggtcgatccaaatgcggcagcagttacgcaggtatgggcttatatcggcgagctgctctttaatatgctcgttttggtcggctcagtgcgaatgtctgaccggattatccgtgagatgatggggctgtaaggagaacagaatgaaacgaatatacaacaaattcaagggctacacccttgcggactgcgattgcagatattgcctgtattacggagggcggcgaaaaagcaaagttatctgtcttgcagacgagtgcgtctgcgccgatgaaatccggcaggcgaaaaaaatgaaagaaaggagttcctaaatggaagtcaaaatcaatagagaaatcaggaattacacagaagcgatgtttttcggactgtcactgcggcagttcattttttctgcctgtgcctgcgtagtggcggtaggtatctatttcttgctcaagccctatgtcggcacggaaaccgtatcgtggatgtgcattttgggagccgccccctttgcggctcttggttttgttaaatataacggaatgaccgcagagaaatttatttatgcgtggattaaatcggagttcttaatgccgaaaaagctcactttccgttcaacgaatacctactacgagctgttcaagccgagtatcgaagcaaaagcaaaggaggctatgaaatcgaatgattaaaacacttaccaatctccgcaaacaggaaaaagaaaagtttgttgtgccgaagggcgttcaggatgtgatccctattaccgccatttatgacgacggtatctttcagaccggaaaagacaagttttccaagacctataaattttccgatattaactatgccgttgccagccgtgaggacaaggaagcaatgttccttgaatactcggaactgctcaattccctagactccggagcaacgacaaaaatcacaatcaacaaccgccgtttaaatcggctggactttgagaacaacattcttatcccgatgaaaggcgacagccttgatgaataccgtgaggagtataataaaatccttttggaaaaagccacaggcgcaaatgctatcgtgcaggataagtatatgacgatttccgtcaacaagaagaatattgaggacgcaaggaattattttgcccgtgtgggcgctgacttgatcgctcacttcggcaggctcggcagcaagtgcgtggagctggaaaccgatgaaaggctgcgtatcttccacgacttttaccgtgtgggcgaggaatcctctttccactttgatataaaggaaacccgcaaaaagggacacagcttcaaggactatatctgccctgattcaatggaatttgaaaaggactacttcaaaatgggcgaccgttatgggagagtcctttttttgcgtgagtatgcttcctatatcaaggacagtatggtggcggagctgacagatctcaaccgcaatctgatgatgtcgattgatgtcgttcccgtgccgacagacgaagcggtacgggaagcggaaaaccgtctgcttggcgttgagacgaatattaccaactggcagaggcggcagaactccaacaataacttttcggcgactgtcccttacgatatggaacagcagaaaaaggaaatgaaagaatttctcgatgatttaacgacgagggatcagagaatgatgtttgccgtgattacctttgtgcatacggcggattccaaagaacagcttgataacgacacggaagcgctgcttaccacggcgagaaagcacctttgtcagttcggcgtgttgaaatttcagcaggtggacgggctgaatacggttatgccgtttggcgtgcggaagattgataccttccgtacccttacgaccgaaagccttgccgtgtttatcccgtttcgagtgcaggatatttttcacgagaatggtatctactacgggcagaatgtgatcagtaaaaatatgattatcgccgaccgcaagcagcttctcaacggtaattcctttatcctcggcgtatccggcggcggcaagtcctttgccgcaaagggcgagatcgagaatgtgattctttcctcggattccgatgtgatcatcattgatccggagcgggaatattcacagcttgtgaaggcgctcggcggcgaggttatccatatctccgctacttctcaaaatcatatcaacgctatggatatgacgaaggaatacggcgacggggcgaatcctgttattttgaagtcggagtttattatgtccctgtgcgagcagctcatcggcggcagcaatctcggcgcaaagcagaaatccattatcgaccgctgcaccgccagcgtgtaccgcacctatcagcagaataactatcagggcgaagtgcctaccttgcaggatttcagggcggagcttctcaagcaggacgagccggaggcgcaggaaatcgcccttgccatcgagctgtttacaaacggcagcctgaacacctttgcgaagcatacgaatgtggataccaataaccgcctgatttgctatgacatcttagacctcggaaaacagcttatgcctatcggtatgctggtcgttctcgactccatcttaaaccgcattacgcagaacagggcgaaaggcagaaataccttcatctttattgatgagatttatctgctgttccagcacgagtattccgctaacttcctttttaccctttggaagcgtgtgcgtaaatacggcgcttatgctacgggtattacgcagaatgtggacgaccttttgcagagccatacggcaaggacaatgctcgcaaactccgagtttatcattatgctcaatcaggcttctacggacaggctggagctggcgaagctcttaaatatctccgaccttcagatgtcatatattacgaatgtggaagccggacacgggcttatcaaggtgggcagctcccttgtgccgttcgccaataaattcccgaaaaatacgaagctgtataagctgatgacaaccaaaccgggcgagagcgcataagctcccgccccttgtttcagaaaggaaatggcaatgagaaaaaagatttgtattgcgctgatggcggcgtttaccgtcctgctcggcgtcagcagctatttcattatcgaccattacagggaggcggaacatcaggagcagatgtacgattctctcgtacagctcgtagaggacagcgaaaccgagcctgccgagccgatcatctattcggaagataagacgatactgccggagcttaccgagctgtaccatcaaaacaatgatttggtcggctggatttgcgtggaggatacgaacatcaattatcccgttatgcagacggttgataacccgaactactatctgaagcgtggatttgataaagaatacagttcttacggctgcccgtatgtgcaggaggactgtgatgtcctaaagccctcggacaatgtagtgatctacggtcatcatatgaacaacggctcgatgttcgccgaccttgaaaaattcaaggacgaggatttctggcgggaacataaaacgattgcttttaataccctgacagagaaaaatgagtacgaaatccttgcggttttcaaaaccgttgtctacaccgacagcccggaagccttcaaatattaccgctttacggacgctcagtcgccggaggagtttgacgcttatattgaaaaatgtaaggagctttccctttacgacacgggcgtatcagcggagtacggcgacaagctgatcacgctttccacctgtgaatattcccgcacgaacggaaggcttgtcgttgtggcgaaaaaagtgacagaaagcagtggtgcaaatgctcccgcaaatgacggggcggcagagataccgagctaacgccctgataaagaagctgtgcgctaattatgatgacgggaactgtctgcttcttgatgagggggaaggctgcgtctgcgtacagagtatatcctactcgcttttgtgcagatatttccgcaatgcggtgcttccggcagatccggcgctggaagcggagatactcggaacgcaccctgacaggtgcgtttcctgcggctctcccattatcaagcgtggcaacaggaaaaagtattgtgagaaatgcgccggtatcgcatacaaaagacagcaggcagagtacgcaagaaaaaagcgcacagaatcgaaaaatagagggtaaaaagtccttgattcaagcggattttcagccctcgcactttgaggggcaaggtgttgataccttttccctcttttttttacttcaaagcgtccacgggcgcttggaaaggaggttttctatgccggatattaagacaagggatatagcgaaaggcacgatcaaaacgattgacaaatcggcggttgccgccgagcgtatgaaatccgcctttatccaggccaaagaaaaagcggaacactccgttgatgtccctgaaagcagtgcggaggaatacgcttccaaccgtttagaaagcggtatcgaccgagtttcccacgaagccgtacaccaatttgataagcaggggcgcaagggcgttcaggcgacaaagcagaatatcgtcaaggcaaaggacggtattcagaaattcaaggaaaagcgggcggcgcagtcgcttcaaaaacaggcgcaggcggcagctccacgaaaaggcgtcagtcagagtatcaaagcggtggaacagccgaagaaagcagtaaaagagtctgcccgttccgcagggaaaaagacgattaagacggttgggaaaggctcggcgaaaacagcgcagaaaacggtaaaaaccgcagagcgcaccgctaaaacgaccgtcaagacagcgcagcgtaccgcaaaggcggcgcagaaaacggcgcaggctacggtcaaggcttctcaaagggcagttcaggcggcacgggcagcggctcgtgccgccgttgtcacggcgaaagcaatcgcaagagcgatagcgcttgcggtcaaggcgattatcgccggaacaaaggcattgattgctgcaatcgccgcaggcggctggatagcggttttggtcattatcgtgatttgcctgattggtatgcttctcggctctgtgttcggtatctttttctcaggcgaggattccggcacgggtatgagtatgcagaccgttgtgcaggaaatcaataccgaatacgataccaaattgcaggacgaaaaaaactcggtatcttatgatgtccttgaaatgaacggcagccgtgccgtttggaaagaggtgcttgcggtgtattccgtcaaagtcaacaccgatccggataatccccaagaggttgcgacgatggacgaatcgaaaaagcagcttctcacggacatcttttgggagatgaacgaaataagctccagcaccgacaccaaaacggagacggtcattactgaaaccgatgacggtcacggaaatatcgtggagacggaaagcacggtcacgcaaacctatctgtatatcacggtcagccataaaaccgccgatgagatggcggcgcagtatggatttaacgaggaacagaaagaatatctcgcagagctgcttgccgatgaaaacaattcgctgtggtcgcaggtgctttacgggattatgggaacggacgatcagattgtaactgtcgccctctctcagattggaaatatgggcggagagccatactggtcttggtacggttttaattcccgtgtcgagtggtgcgcttgcttcgtttcgtggtgcgccaacgagtgcgggtatattgacgctggcgtgattccgaaatacgcaggctgcgtcaacggcgtacaatggtttaaggacagagggcaatggctggataacagcgcagagcctacacccggaatgattatcttcttcgattgggcggacgaaagcggtcaggacggattatccgaccatacgggtatcgtccaaaaggtggaaaacggcagagtttacacggtcgagggcaactccggggattctgttcgtcagaacagctatccggttgggtattatgagatactcggctacggtgcgcctgcctattgatcggaaggtaaaaacgagccgcttgcttaaatgcaggcggcttgattacatacaaatgaactgaatctgaaatgaacatatattttcgattacgcttcatttttatattgacaatacagtatgatatacagtataatgacatcaggaggtaacgctgatgggagaagaaaaagatttattatctactttgcttctggaacttcgcagagggacattgacaattagtgtactcagtcagatgaatgagccgaaatacggttatgctttggtgcagagcttggaagaaaaaggcgttgccattgatcccaataccctttatcctctacttcggcgtctggagagtcagcaacttttagaaagcaagtgggaaaccagtggcacaaagccaagaaagtattatcaacgaacagagtatggaacacaggtctatgaacagatgaaaatatattggaataatctgtctgccggaatcgaaaggttattagaggaggaagaagaatgacaccgaatgagaaagattatatggatcgatatatttatcaagtgattcatcggcttcccaaagcacaacgagaggaagttcgtatggagttggaagaactgatcagtgatatgtatgcggatagaggctctatggaagaagtgctgactgaacttggcgatcctgctgaatttgcaaagcaatatcaaaacgagcagaagtatttgattggacctgaatattttgacacttatttgtggtttgtaaaagttgtcttaatatgcgctgccgtaccaattttgattatttcgctgataaatgcgataggagaaatgcccgcaatcacttcgcagaacgccgcctctgttattattcgagctattgtggacggattgatcgttggaattaccgacgctatgctgtcctgcatatccgctttcggtgcagtaaccttgactttcgccattatggagcggaaaaagattcagatcgaaatgaagaaggcagagaaatggtcagtagaaagcctatctgaagaacgaaaaacgccatcctccagatggacgccaaagattttggagcctgtaccggataaaaaagcaattataagtcgtggagatagtattgtgggcattgtgtttatcgttattttcagtgtattgctaatttttgcccctcatttctttgctgcgatttttacggaaggcgaagccataacaaccgtacccgttttcaatttggaacaatggggaattgttctgcctgtctttgtaatcagtctgctgattggtcttatagatgagattttgcgtctgatcatcggcgtttattgtaagctggtaatgatcagcaatattttgtgtggggtaattcagattgtgttaagcgccattgtgctgaaagttttacctatctggaatccgaattttgtacttgagattgaacaggcgttgggtgctaatgcagattcaagcgcaaactttttcacttactggaacgctgatatggtatccaatggactgcttgcgtttattgttgttattactctgtttgagattggtgtgacgatttacaaaacgctccgttatggggtttccgtaaaaaacggtataaattccaatacataaaaaattgtagtttttagaatattttgattatggaaatagtttatgatgaaacaaaaatacggtgctacccatttggggtaacaccgtattttttcccgcttttattgatttttatatttatccatttcaactaacatcttatataaatgttcttgctcggatttactttttgctgcgaccagctcgtaacatttcataggatagctgtcggtgctgctttcgcctatcttctcaaaaagctgagcaagcgagatattcatagctgaagcaatcttttcaatactttcaagagtagcgttcttttcccctcgttccacttgcccgatataagtagggtggcaaccggataactcagcaagcttctcttggctcaatcccttatcaattctataattgcggacacgctgtccgattgtttttgcaatttcactcatagttccagcctccattcatagtctataaatattgtttccgtagttccacagactattgatatttattgttgactttgatatactatgagtattataattagattttttgtgcttttaggctttgaactggctggtgaactttaatgaggggaaaaacggcttgctttaccggacatagaaaaataccgccggagagcataccggaactctctcagcggttaaaaaacaccttgcttcgactgatagaagaaggatatatgtactttggcgcaggtggagcattgggctttgatacgctggctgctcaatgcgttttatccttgagaaagcgatattcacatatcaagctgattttagtccttccgtgtaccacacagacaaaaggctggagcaaagatgatatagcggtttatgaggagatcaaaagtcaggcggataaggtagtatatacttctcacgactatttccggggctgtatgttcaaaagaaaccgccatttggtaaatggcagcagtgtctgcatagcctatttaacacaggagaaaggcgggactgcatatacggtaaattatgctcggcaaaacaatgtgcaagtgataaacttagctgctcaatagatgtgaagaatgggaagattgaaaaaagttcatctccgaatggaaagtatacttgacatttgcgccctctttgctataatagagatatggaaagctggctttccatagaaaggaggcgcaccgtgaaaaaccgtttagaggaaatccggaaagaacggggaatcaagcaggaagaactggctgccgcactggaagtatctcggcagactatcggctcgttggaaaacggacgatacaatccttcaattacattggcgtttaagcttgcacggtattttgatatgagcattgaagatattttcatttacgaggaggaaaagcaatgaagaagaaaaccggaatatatcttgtaattggcatagtcggcattgctttggctctgagcgcaagatttcttttacaggactgtttgagcgattcgcaaagcggagcgatgatcgggataggtgccggattgttcggctatgggattgcgaaatggtgtgtcggtctgtggggcgcaaaaaatcccgatttgatgaaaatcaatgaaattgaagaaaaagacgagcgcaatcagctcattcgcagcaaagcacaggcaatatccggcgagatactgcactggctgctgatggcaggcgcttgggtatgtatttttttcgacgcaccactatggattgttcttactcttgtaggcgctttcctgcttaaaacaatccttgattttattttgatggcatattaccagcataagatgtgacggaggatattatgaaatttgtaattgagcatttgtcaaaaagctttgagaaaaaggaagttctcagagatattgattttacttttgatgaagggaaaatttatgggctgctcggcagaaacggcgctggaaaaacaacgctgtttaactgcctgaacagggatttgaaggcggatagcggcaatttctatatagaagatgaaaacggcgtccgccgtgaggtgtccgcagaggacatcggatatgtactctctaccccgaccgtgccggagtttcttacaggcagggagtttttgaaattctttatggacatcaacgagaagtctatcaaaaatccgaaaagcattgacgagtatttcgattatatgagtattgagccggaggacagggataaactgctcaaggactactcccacggtatgaaaaacaaaatgcaaatgctcatcaatatcatcgctcagccgaatatcctgctgctcgacgagcctttgacatcccttgatgtggttgtggcggaagaaatgaaacaactgctccgttcactgaaacaagaccgcattaccattttctccactcatattatggatttggcgcttgacctctgcgatgagatcgtgctgcttaatcacggcgaactggaggtcgtggagaaaaccgatctggacagcagggaatttaaggataaaatcattgcggcactcagggaggaaggaaatgaataagacgcttaaaatatctttttccctgaaaaatacataccgtgtcaacggtgtcctgttttccttaaagcagataccgctcgtaaagcggctgcttccggcaacgctgtatcaggtaaaggggctgaaaatctttgcaaacattttgtccgtgctgtgggaaatcgtttctgtattcctcggcaagttcctttactttatcacgatggtatgcggtatcggtatcctttataacggactgccggagaatgaggtgttcctgcatatcctgctgattctcacggtaatcggcagctttgtaaacacacaccttttcaatccgacaaaggataaatattatgcgatgatcctgatgaaaatggacgcacgagaatatacgcttgtaaactatttctactccatcctgaaggtcgttgtgggctttttgccctttacgattctgttcggtatggacagaggcgtacctttgtggttttgtctgctcctgcccctttgcatagcgggtatgaagctgtttgcggcggctgttaccctgtgggattatgagaaaaggggatttggctacaacgaaaataagctgtccaaatatgtgtggtgctgtatcgccctgcttttagccgcagcctatgctccgcccgcctttggttttgctttgcctgcggtcgtaccaatggttatatttttagcgtgtattccccttggtatggcaagtatcacaaggctcactaccttccgtgattattacgcaatcaacaaggaattattagccggattgaccaatcagatggacagcacggcacagacaaagcttatcaaacaggcaaatgaaaagaaaatatccgcagatacttccattagcagcaaccgcaagggcttcgagtatctgaatgagctgtttatcaaaaggcataaaaagatactctggaactcgacaaagaagatttcctatgtgtgcgctttccttgtcgccgccgtgctggcaggcgtctatctgctgcccgaagaaaaaaccgtcattaacgaaatcgtgatgacttggcttccgtactttgtatttataatgtacgctatcaaccgtggcacgaactttacacaggcgctttttatgaactgcgatcacagcctgctgacctattcgttttataagcagccgagctttatcctgcggctgtttcagattcgcctgcgtgagattatgaaaatcaacgctgttccggcgctcgtgatcggtatcggactggcgctgatcctgtttgccaccggagggacggacaatccgctgaactatgtagtgctggttgtttccatcctgtgtatgagcctgtttttctcgattcattacctgacgatttactatctgctccagccttacaatgcagggacggagctgaaaagcggcacatatcggattgttttgtcagtaacctatgtcgtctgttttgctcttatgcggctgcgtatgccgattatgatatttggaataatgacgattgttttctgtgtgctttacagtattgtcgccagcattttggtataccgctttgcgccgaaaacctttaggctgagaacataacggggcggttttaccgccggaaatccataaaaagaaacggaggatttatttatgagaaagtgtctcagatgtggaacggaaatgaaagaaaactgcgccatcaaggtagaaggcgcaggatacggaattgtaatgtcatcggacgaaaataagctgttcggcggcagaatcggcaagccgaaggtagcaatctgtcccaagtgcggcgaagtctccatctatgtggaagatgtagagaagctgtgacggtaaatggaggcggtatgaaatgaaaaagattttatctgtgtttttgatgtcattcatcgtattcgctctctctgcttgcaatgctgatgtcgtgaagatggaagattatgagtggaaaatgagaacggttatgagcaatgatacggaagctgcccaatatcaggatgaactcgtggttgccgtaggagaagctgacgagctgtatcctgacgctgaaatcgtggatatgactttgactgctaaagatggagaaatcacgataacggataccacaaacggcaagacatataacggcacttatgaggtaatgcagaaaacgccgaagggaacggactatgagattatcattgatggagtgaccggctatgctaccgtagctcctacggaatactatgacggaactgaaattccgacgctgccaatcaatataggtggctattccttatactttatcccaaatgagtcgtaatctactcaggttagagaaaggcataatgatgaagatcgagattgaaaaggattttccccagtattttaagccagcctatccggaagaatttgagctgttctctcactttgaagtaacagcaggaataccgaccgttctctttgctgtcacgacttggaaagagaacgggaaaccgaatgtgtgctttcattcgtggagttgctttcacggagataagaccgcttttttcgctgtgatgggcaacctgtatcagcatacccacacctatgccaatatccaaagagaaaaatgcttttgcattaattttctcccgataagctgttatgacaggttggtaaataccattcatcagaatgaatgggacgatgacgaatttgcagcaggaggctttactgtttccgacgccaaaaccattcacgcacctgcgatcagcgaagcgtttctcacgatagaatgtaccctgaaagaaatacaggatttaagcggtgcgggaattacggctatggtaatcggacaggtacagcacatctctgtggaagaagcgtatgcacaagggtatgaattaagatatggcaaggacggatttatgctgcttgtgcctgcgccgcaagaccttgttaccggagagccgaaccagtcggcgattgccaccgtgcatattgagaaatacgactgatttaaggagaaagtaaaatggcggtttcaaatataaaagcgctgatccccggcgaacttcaaaaagtgtgggagctggtgttggatattgaaaattacggagcttggagaagcgatttgagcaagacagaagttatcagcgataagcaatttattgaatacaccaaagatggctacccgacgacctttaccgtgacgcttgctgagccatacagacgatgggagtttgatatggaaaacagcaatatgacaggtcattggactggtgttttcactgccaaaggagacgaaacagagatagattttacggagcaagtggaagcgaagaaatggttgctgaagccctttgtaaagtcctatctaagaaaacagcagacacagtttgttgcggatataatggaaaacttttcttaaagacttatacatagggaggcggtttgttatgaagaagtatgagtatatgaccgttgatttaagcgcagagccatcgtttaatgttcatattaagctggaacggtatattgagaagctcaatgaatatggaaaacagggctggcgtttgatttccggaactgatgactggaagtattctatctttgagcgtgaaattgatgatggagaaaaacagacaggaggcgtgtaacctatgaaagatatgatcggatactgcggactggattgtgaaaaatgtgacgcatatattgcgacaattaacaacgatcaagccttgcgtgagaaaacagcgaagctgtgggcagagttaaataacgcccctattctgcctgaacatattaactgtgagggctgccgtatgagtggagcaaaaacggtattttgcgatagtctgtgtagaattcggaagtgtgcgttaagtaaaggcgtttccacctgcggtgactgttctgaattagaaaattgcccgattgttggggcaatcctcaaaaataattcggctgctttggaaaatttgaaaggatagaatccatagagtaacaaattaaagaggtatggaaattatggaaaaagagaaaatcaggtttatatgttttttacttgcttcagtatgtttctttatagtgtcaataatgaattttatggataagaatactgccccggcaataacattcttattattaggtatttcatttttacttttatcaactacacatttgaaaaaagataaataatcacaacaccaaattcggaggagatacaatgcttgaaaatgcccctactcaatcaactatgacggaattgcttggacaatctctgtttgaagtgtggcaggagttgtgttcggcgattgatgaaaaatacgatatggaacggctatggaatacaggcggtaagaactggacttacgaatacaagtaccgcagaggcggtaaaacgctttgcagtctatacgccaaaaggaactgcgttggttttatgattattttcggcaaagatgaaagagcaaaatttgaagctataagggatacgctttctgactgtgtttgtagacaatatgatgaagcaacaacttatcgtgacgggaaatgggtgatgtttaagccaaccgatacttctgaattcgatgactatatgaagctgctggctattaaaagaaaacccaatcgaaaataaattgcatttttagtttaacagagaaaagaaattccattaaggcgtttattatgaaagaaggtgaaatatatgaatatcttcgagatgatcattacactggcaatttctttgggagcagtagtatggggagtgaatatttatcatcaaaagggtacttggtttcttgctggttggaatacaatgagtaaagaagaaaaagcgacttataatgaggaggcaatctgtcatttattcggacgatgtgtagttttctgcggaataggagcatttttattattgtatggcagttttaatcaaaatgactttatattatgcagcggacttggaatcattgcaataatggttattttatcaatcgtaataccaaagataaatataaaaaaatatcgcaaataaagttatcgattatgatactaattttcggaggtggcgagaatgaagttgaaaaatcctatgttggtagtgactgatatggacagatcagttgaattttataaaaaagtctttggacttcatatcattatggactttggagcaaataagacactaacaggcggtttagccttacaaactgttgaaacatataaaaattttatcggtacaaatgacatttcttttggcggcaataacttcgagatttattttgaggaagatgatttcgataagtttgccgagaggctgaaggaatgtgatattgaatatatccacccgactatggaacattcttgggggcagagagtcgtccgcttttatgatcctgataagcatattatcgaagtcggagagaatatgaaggtcgtatgcaagcgtttcttggatagtggaatgacgccggaacaggttgcaaagcgaatggatgtacctatgaagtttataaatgcttgtatgcggtaaggctatttttaaatggataaggaacgagtaagatatgaactactctataagagaaatgcgaaaagaagaatatagtctgctcggtgactttttgtacgaagcaatttatattccggatggtacggctgcgccgcctaaatcagtgatagcttgtcccgaattgcaagtatatattgcagactttggaaacagcaaacacgataaggctttgattgcagaagttgacggcaatattgttggagcaatatgggcaagaattatgaacgattacggacatattgatgataatactccatcgcttgcaatgtctgtccttaaagcgtacaggggtatgggaatcggaacttcattactcacgcaaatgatgtcaacggaaaaagctgccggttatgcgaagctttctttatctgttcaaaaggacaattatgcagtaaagctatatcgaaaagctggctttatagcggtcaaagaaacggacgaggaatacattatgatcgtcaatctaaattctatttacaaaacgatcgtatttgactataaaaacggtttaccacgactttagtagaatacatagattagaaaattttaatttcttaaggagggtttacaatgaaatgtataaaatgccataacacactacacacggaaactggcggattttctatgaccatcaacggaaaaactataaaagtcataaacgcacctgtattacattgcaagaactgtaattcggtaattattagcgatgaagtaaaagaaaaggcaaaagaattttcaaaagtgtatttatatccagacaatactcttgattacgcagaatgtgaagctggaacgatgatgtcggtaatgaatttactgttttgatgatgacaaaatcctaagttgttgaacaggaagatatatgtgataacatattggactgataaggagtaagcaaaatggcttttgattacaagaaagaatacaaggaattttatatgccgaagaacaagcccggaattatagagattccgaaaatgaactatatcgccgtccggggaaaaggcaatcctaacgaggaaaacggagaatacaaaaactcaatcggcttgctgtacggcatcgcctttaccataaagatgagctacaaggggacgcataagatcgagggtttctttgaatatgtcgtaccgccccttgaaggactttggtggcaggaaaacacaaagggacttgattacgccagaaaagaagatatgcattttatctctatgatccggctgccggacttcgtaacgaaggaagattttgagtgggcagttgaagaagcaacaaaaaagaaaaagcaggatttttctaaagttgagttcttcccctatgatgaaggactgtgcgttcagtgtatgcacatcggctcttatgacgatgagcctgccaccgttgatttaatgcacgactatatgaaagcaaacgggtatgagctggatattacggacacaagataccatcacgaaatctatctgagcgatccgagaaaatgtgatgtgagcagactgaaaacagttgtgcgccacccaatccggaaagctgagtaaacggaggatattatgcctaaagaagtcgaccctaaagatactgcacgagctacggcatatgcactttggatgaaagcacccaatccaatggtaacttttttcaaaacccttgatgtcacaaatctgatcaaggtcagcaggaaaagaagcctgaagtttaatatgctgctcgattactgtatcggcagagccgccgcagaggtaaaggagttttatatccttccggtcggcgataaactcatacagtatgacaccatagcagtcaataccatagtgaaaaacaaagaaggcgaagtcagctcctgcgacctttcctataaagccgagttaaatcagttcaacgaggagtatctgaaatatacggtacaggtcgccgcaagctgtcaggacagggacttatccgaaaatagtatggtcatcggcacttccgctatcatagatacggaaattgacggagctgttggtatgaacagtggtattttcaataatccctttattatttggggcagatacaaaaagaaatggtttcggtattacctgcccatctctttccagttccatcatacacagatggacggcgctcacgcaggcgcatttttgaaaaacttgcaaaatgaaattaacctgttgaaatagcggcaggaagaaaggagtatgcttatggaggaattgaaagcgattatgcagaaatttgctgcgtccggttgggacttaatcgcagttccggctcaggaatggctggacgggaactctaataaagacactttggtatcagcaatcgaacaggcggacaaagaatgcggaagctgcggatgtgagttagatccgctgtataaaagagcgttggagcgtttataagcaatttaagcaaacaatacgaccgccaatcaaaaaactggcggtcgtttgcttattttataactttccaatatccggttttgtttgatccgactcgctggataagtcctttttctttcaatgccttaatagctcgatctattgtactctttccaagagaagtcctatcacaaagtgcttgctttgtaatacttggtgtttcaatgattgcgtcaaggacggttttttgaacaggagataattttattgcttcatttattacctcatttattgccccattgctctcatttattaccccattccgtatcgtcgcattgagcataaaggcgttatccgtgtattccggtgcgggaagtccggcgtcagacatttccttaaacatacggtcaacgccttcgccaaactccttcacataatcatattcttgcaggaaacgggcgattttaggatttcttgaaaaatgaacggtgcggatgttgctcaaacgcacaatgccggggagcttgccgggactttctacggtaatgtgatcgtcaaacatttttatctgaatgtccgttcctttaatgctgtaatctcgatgagcgatggcgttgatgatgatttctttccaaacgaactcagggtattccggcgtagtgtgaaatctgccatcatttccaagccgtgtgcgctccttgatctgatcgcctacaaattcaagagattgccgtaccacatcaaggatttttccctcgaacatcttatccttgatgacattcatttctgtaccgacctttgcctctgtcccgtcatagcggataaaacgcacccttgctctcggaaagaaacgctgtggctctttcccgaaaagaagaagcgccgctccgctcatttcttctctaccatcgtgccggacaatgtaatctttgttttgcctgatgtattcctcggcggatttggaatagccgattttcttgcagtattcagcgacaaaatccatatcaatatcatctaaagcagaccggaacacaggctcatcttcatagtagcgtgagcctttggcgtacataagctgtaagcgttcgtcaaagttcagcttctttgacttgtcgcccatccggtaatatacctcgtcctgctggttggcgtgaagctcggagctttggggaatcgttataatcaaaagatgatttggattcccgtccttgtccctgcaatcaaccgtttcggtcgttaccattaccgaaggagtgcagtaatcgaaggggacacggagaatgtcgttgatattgttggtatatgcgtctatacctgttatatctccattgtcctcaataccaatgacaagtgtgccgccatctgcattggcgaaagctacgatatgattggataatcccttagcgtctttccttgcgcttttgcggtcaaagacctgatcttcctttttcgtgcataattcttcaatcgagtatttcatatatagacagctccaatctgttgctttatttcaaaaattgattgcggtattcctgatgacggaaacgatagccttgtgcgatcagcgtatccgttttcaatgcgaccaagtttatgtccgagtgcattgcccgtgcgatctgttgaatatcatacccgttttcgatatattccagtatttcatcatcaggcagggagatttgggaagcaaagatgtttgcctcgtactccattcggctttgccgcatatcgaaaatattaaattccttgaagccgccggctttgaccgcttcttctctatgtaatgcgtcgtgtccaatctcgtgcagcattacaatacgctccattacagggtgcagatcgtcttttatgaagataaaacggttacgcattaaaaccttgtatgcccctcgctgtttcttgaaggctaatgggataacttctatgcccagttcttgtgcgattctatgcggatctcttgtgcaaaggtcatttgccagacgattcgcctttctgacaatctctaaagtctgaatatccaagagcaaacacccccattctactgccagtaagtatatcttatcaaatacactgtccgaaaaagaggacatcaagcgttatttccggtattttttgggagtgtactttttattcttctctttggcgatccagtacgcttcctgaatgcctttcatcatctcgtccaaatcctcatctgcaagctcgccgcctgcaaaaagccccgtaacctctgccataagctcctttgcctgtcttgcgcctttgcttccgtatttggattcagcgttcagcagaaattcctcgtcatcggtaagcagatagttgacatcgaccttcaggatttccgctatcttataataggtttccctctttttcgggtagcgggtgccagcctcataattcgatattgtccgcagagaaacgccgattgcttttgcaagctcatcttgctttaagcctgccttcgtgcgggcttcttttactttctcacagaatttcatttcatctgacctccaaattatcccacctgatttgaaaatatcttgcgtatccatattgacaaacgcaagttgatttcgtataatgtcaatacgcaagtaagttgcgtatatataatacctgaacttgcgtgttttgtcaagggagttcagcaaattagcttgaacttttatctaccaacaaatgatacccgttttaaggattgaggcgaacagatgggacggaaagatacactcgctgcgaaaagcattcggaaaatgtatgagcagcttaatttgaatcaatcggatatattctcgaaaacaaaactgcttctcagcgtataccgtgatgtggtctggattacgctgagcgaatctgcctgtgtgaatgaggagctggtctattacggagaagaactgaacagcgcccttgtttatttggagctgtttgcgccggataccgagaagcaggagtttgagagccgtatcagcgccttgtttgaaaacaagtggatggttgatctgattgataccgctatggcgaaaatatatgactaccataacaacggcaggctgtaccacgaaatcatatcaaaaagctacctgacagcgtttcggtatacggagagcgacctgctcgatctcttgaatatggagcgcagtaccttttacgaccggaaacgggaagcgattttgcttctcggtgtatccctgtggggatatgcgattccgagcttcaaaggaatctttaatatgaagggagatgatgaaagcggcgatattcccgattttttcaaataaaagcttgtccgactaaagtccgacgaaatccctactgaatgtccgaccttgcgtatgctacactgtgtatgctgcccgaagaacggctttcgtttacggaacgaggctgaaaacaaaatggcagaaaattggcgcagttttgccgatgatacgaaaaagcaaatctgttacaattagtatgcctaaagctttgagaatttttcttgattttcaaatgctggttgaatatcttttaggcggcaatacagcagcttaggcaaaacgaattgaatatgtgttttgaagaagcagttatagctttcagccttcgggcttgaatgttatagctgctttttttgtgcagcccttttcgcttttgtcaagcggaaagggagctttatgtctatcacagtatggcaggcatttgtatgtaggtatccgtgatctccggagtttttgattgtgaccttatatatcaaaaattccaaatttaaggagattacggaaatgaaaaaacttacagtaaaaaagcaggtagaattatttgcacaggattgtaaactcatcaaccttcggtatgagtatagtggtttcactggaacggaaaaatgggcaattataacggagctgtccgaagaagcattgtgggataagtaccctgatgtcatcagcaggtatacgccttttatacttctgtcaatggcacagggagaagtgattagtgaatcacatagaaataatgataaatatgaaaagcgcagcaaaaggacgatagatgtatacggttacgaagatgatatttttgagcagttccatccgaaatctatcgccccatttattgatccgtttgataaagcggaggaggaacagatcgaggaagaaaaagaaaagctgcggcaattagaactttctaaggtaagacaagcgttaagtatgctgcaacctgttcaaagggagcgccttcttaaatccgttttgcttgggattagttcaaggaaaattgcgaaagaggagggcataaattatagctccgtagataagtcaatcgctgccgcaataaaaaatttcaaaaaattttatgaaaatctctgattttgggtgtgcatttcgcacccctttgtccaaatgagtgaaggggtatttctattccggatatgaaatgcgctttcaaaactcaatgaacagagaggttatacataaaatgaagaaaacagaaatcaggcgtggagatatattttcctacgattttggcacaagaatcggctctatccaatcaggtgtaagacctgtgctggtaattcaggcagacaatttcaatgcgaatgcgcctactgttattgttgcgtccattacgagtgtaataaaaaagaggtatttgccgtcccacattattttaggcgaggattttggtctgacgaagccttcaatggtgttgcttgagcaaatacagactgtgaataaagatgatttgacagagtatattggctttgttgatgatgagcgcctttggagacagattaacgcagccttgaaaaaaacattcggtctatggctttacaacactaacaggatcggcgacattcgctgcctgtgtccgaaatgcttaaacgactattttcgcaatccgaactatgttgtcagacgccttgatcctttcgctaaaagtaaaggcacttgtgataagtgcaatgatagaggttgggattatatcgtttatgacaaacgcacctctttcaaagggaaaggggtatagggatgtcgcaaaacagggaaaggaaacggaagtttgacattcctatatggtgtaaggcaaatctgtcgattgaagaagccgcagcctattccggtatcggaatggcaaagctttatgagatgacagaaagtgaggattgcccatttgtcttatggataggtagccggagaatgattaagcgaaaagcttttgatgagtatatagagcggcaatactcaatttaatgaaaaagtcaagcctgcgatgagccgattcgcataattggcttatcgcaggatattgactatgctgtaactaccaaaagcaaggaggtgcagcaatatgctcaacaaaaagaacgatccggatatgtcgagagtcccgttgtggaagaaaatgaatttaacggtggaagaagccgccgaatactcaggaataggcgtatctaaaattaaagaaatttcaaatcaaaaaaactgtccctttgtcctatggaatggaacaaagcggttgattaaaagaaaacaattcgaggattatctcgaaacacaatattccgtctgagaggaggacaagctaatggataataaactgactgaaacaggcagttccaaaaggcgtgtggctgctgttccaatttgggtaaaaccttatttgacgatagaagaagcggcagagtatacgggaataggtagggataagctttatgaaatgacgagccttgccgattgtccgtttgtgctgtgggtaggcaatcggagaatgattaagcgcaggatttttgatgaatacattgagcaaatgtattcaatatgatggaggttgtatggacgaaaaaattttagcttacagaagtgaactccaaaagaggtcggaaaacacacagttttggacgaaaacgattttaaccgttgaagaagctgccgcatacaccggaatcggaagggcaaaaatccgccaaatcatttcacaagggaattgtcctttcacggtaaataacggcacacaaatctgtgtgatccgagaagcgttcattgattatcttgataagcagtttcgcatataggaggagagagaattatgccgagaacaaaaagaaaagacaagtcgagagccgtgcttcggacaggcgaatcgcaaagggctgacggaacttatcaattccgatggactgacagcaatcataagaggttttgcgtatatgccaagacgcttgatgaattgcgctacaaggaagaacaaattaaaaaagataagagcgatggcattaaaaccgaagcccgatatacgacggtcaatgaggtctatgagctttggaaggaactgaagcgagggctgaagaacaacacctttgagaattataaatatatgtatgaaacctttgtccgtcatcaaataggctcaaagacagtctcatcattgaaaaaaacagacataaagaggttttataattaccttacagacgagcgccagttaaagccttcgaccattgacagtatccatacggttttacatcagattttggatatggctgttgacgatgattatataaggaataatccgtcagataatgtacttagagagttgaagcaagcacattgcttcaagacagaaaagcgcagagctttaacccgtcccgaacaggagctgtttttaagctatttgaaaaatacccccgccgcacaatattggtatccgatctttgcggttttggtagggacaggacttcgagtcggagaacttaccggattaagatggtgtgatgtcgatctggagaatggtgttattgatgtaaatcatactttggtttactatgaccaccgcaccgatggaagcaaaaaaggctgctattttaatgtcaatacgccgaaaactccggcaggaaagagaaaagtgccaatgctcagttttgtgaaagaggcaattataatggaaaaggaaaggcaggagttgctcgatcttcattgtatcgctaccattgatggatacacagattttatctttatcaatcgtttcggcaatccgcaacatcagggaacgctcaataaagcaatccgccgcataatccgtgactgcaatgatgagcagtttttgaaaaacgaaaatcccgaagtgctgcttccgcattttagctgccattcattaagacatacatttacgacgagaatgtgcgaagcgggtgtgaatgtcaaggtcattcaagatacgcttggtcataaggatatttcaacaacgctcaatatctataccgatgtgacgaaggagcttaggcagtctgagtttgaaggtcttgactcatatttcaaaagcgagtataataaagtgtccaacgaataagtggcatttcttgagcgaggataaaagcttctacaccatttacaccaatttatactccaatccaccgaaaaacagcacgaatttatagggatatagtgaatcaatcagaacccccgtttagacctgttatgagatataaggaggtttaggagagattgaaaagatggttgctttcgtcccgacaatgaagaccctggaaccaaagcgggctgaaaacaaagccgaaaaagcaacggtaaatcgttctgcagaggatgcaaccgtgtccgcgccaagcgtacagattgatctttccaaggtgaaaatcgagcctttgtttgcagatgatgtagactttgagacattcagcaagtctgatttcagagtggttaagatcgaagcctgtgaggcagtgccgaagtccaagaagctcctgaaattcacactgaatgacggaacagaccggaaacgcaccattttaagcggtattcacgagtattacgagccggaagagctggttgggaagacctgtgtggcaatcacaaacctgccgccgagaaagatgatgggtattgattccgagggtatgctgatttccgcagtgtacgagtatgacggacgggaaggcttaaatcttttgatgctggatgacagtattccggcaggtgcaaagctctattaagatgatgtaaagatgtaccgttttaccaaatagacgggacgtacttcatttgataaaaaactaaaaaaacagcgatttacatcaaacttacatcaattgatgcagaaatcggtgcaagcaagaaaaaatcgcataatcagtgcaatgagtgggcaattccaatcggagttgcccatttttaaaacaaacagaaatacaaatcggaatttataaaggagaatattgatgaaactgtttttatgttcgcatttttcaagtgtaggaagtctgataaaggaagaaattgataacaagaaagtcgcatttattcccacagcttcgctgcgtgaaggctacaccggttatgtcggctcggctcgaaaattattcaaaaagttgggagcaatcgtaactgaaattgatatttcaacggaggcttattcaacgatacagtctgtttttgaagatgcggatgtgatatattttaccggcggaaattcttttttccttatagaccagctccgtaaaacgggaacggatgagctgttgaagaaagaattggcaaagggaaaactgatgattggtgaatcggcaggtgcgattatatgcgctccaagcatccaatatatcgagcaaatggatgaaaagccagaggactactcacaagaagatgatgcagggcttgatttgattgatttctatgttcttccgcattatcttacagcaccatttaagaaagttaccgagaaaataatgactgagttttcggatttgaatctatgcccaattaacaaccgtcagggaattgtaattgatggtgaaggttcaaaggttatttgcaaagactaatttgaaaattccagtttgtcaacttgccctttgagagaggagaaatccttttctcaaagggctttttctatttatacggatattcgcaaactacaagataaagccaaaacttcattgacaatatcacatactgcgaacttgacggtagaaaaagtcacaatgtcgtagtataatattcttaaatcagaatgactaatcggaatttgtggaggtaaaatatagatgaatcaaggtagaattattgtaatcacaggtgcgccggggacaggaaaaactacaacggcatctgctgttgcaaaagaatcagatttggaaaagtctgtgcatatgcacacagatgacttttatcattatttgagtaaaggggcaataccaccgcatttgccagaatcaaatgagcaaaatttgattgtcattgaagcgtttttagaagctgcgaagcgatatgctcgtggtggatatgatgtaattgtagatggcattgtaggaccgtggtttttagagccgtggctcaacattgttcaagagcattatgaagtacactatatcgttttaagggcaagtaaagaagaaactatgaagcgagctatcgaacgctcaaagttagacagagaaacaaatattgaattagttgaaacaatgtggaagcaattttccaatttaggaatctatgaattaaatgttatagatacaactacgcattcaatcaaagatactgtttcagcagtaaaagaaaaaatagcaagcggtacggctttactatactgcgaacttgacggtagaaaaagtcacaatgtcgtagtataatattcttaaatcagaatgactaatcgaaattcgacggaggagaatgtgaaatgaaaatttatgacatttcccaagaggttttcggctgtcaggtatttgccggcgatccggcgcctgaaaaaaagcagctttgctcaatagaaaagggcgatttgtataacctgacggcttttggtatgtgtgctcacaacggcacgcatatcgacgcgccgttccactttatcaaaggcggaaaaaccgttgattccataggcttggacacattcgtaggaatggcttatgttgcggaatattgcggaattgtctccggcaccgcagcggcggaaatccttgaaaaagcgaaaaaacagaacccggaagcggcaatgagaattcttattaagggagacgcggaggtttcttcggaggcagcgaaagtatttgccgactcggggatcttactgctcggcaacgaatcccagactgtcgggcccgaagctgctccaatggaggtacatctcatcctgctgggggccggtatcgtattgcttgaaggaatccgtttggcagaagttccggaaggcagttatttcttaaatgcagcgccattaaaactatccggtgcggatggttcgccgtgcagagctgtactgatcgctgctgagagataaattccagtttgccaacttgccctttgagagaggagaaatccttttctcaaagggctttttctatttatacggatattcgcaaactacaagataaagccaaaacttcattgacaatatcacatactgcgaacttgacagtagaaaaagtcacaatatcgtcgtataatatgcttaaatcagaatgacaaatcggaatttgttcacttactgaactcgacacaaactgcaaatcgtgttgttcagttcgtactcatttgacggtataataaagccatcaaatgaaggaggcaataagccatgaacacagataaaatttttgcagaacaactcgccaacgaatatgcacccaaggacacctcgaaagtggtcgccctgcggaagctggacgcaaaagcaaaactccccgcaactattttcacctacaccctcggtattatttcggcgcttgtattcggcatgggaatgtgccttgccatggggcagatcggcagcggcacaacttccagctttgtgctgggtatcgcaatcggcgttgtcgggatgatcggcatgggcgtaaactatccgattcacaagaagctgctggcacagggcaagcagaagtatgcctttgagatcatggaattggccaaagagatcagtgagcggtaagtcgtgaagcgaacacaggtaattctgtatcgggttctgcacccaccgaaatggattctatgtcctttgccgcccattgtgtacggtgctgtgattctgattgccgtatctatgctgcttcatagcagaaaaaggaaagagatgaagccccttgaatcgctcggagagtaaatattttgccactgccgcccgcatggatgaggcatttttggagcttttggaaaagaaagacttcacctatatcacggtgaaggaaatctgcgaaaaagcaggcgtcaaccgatccaccttctatctgcattatgaaaccgtaagcgatcttctggcagagagcgcccgatacatcatcgatcaatttgtggaggcaatgccgcatgacacagcagagtttatgtcgcagattcaaacccgtccgctggaagaattatatcttatcacgccggagtatctgacgccgtatttgaactatatcaaaaagcacagacggatattccgtaccaccctcgaacaggcgtccgtcttaggaatgaacgatgcttatctttccctgaatcgtcatgtattcataccaatcctgaatcggtatcacgttccgttgcctaaccaaaaatacatgatgccgttttatataaacggtatcatgggaattgtcaatgaatggctgaaagagaactgtgaggattccattgagcacatgatttctgtgattcaggtctgtattcccggtcatcaatttgaggaatcgcagcgataacttccagtttgtcgaactgaatatagcgtacatagccgcttggttttcaaaagaaatcaggcggctatttctattttgaaggaggtgttcgctatgaacgaaacagattacaacgctcgcctttatgagaaaatgaaagccgagcaggacaaataccgggaccggctgctgcatccctacgaatacacgatgcgggtggacatcgtaatggaagaagccagcgtttgtggaaatgtcacaatttacggaggtgaagtttcaaattccacttgcctttttgcacttgatatgatattattggtatgtgtactaaaacgtttggagagaggcgatatatttgcggagagacagcagtgaaacaaagaggaaaatactgactgtgtgcgtccgtctctttctggaacaggggtataaaaacacctctgtcagtcagattgtggacgaagcaggtgttgcaagaggaagctatttgaatctgtttccgaccaaggacagaattttgctggaattgaccgaaacgatgttcggcggacagttcggcgtggcaagaagcattgcagacagcaagctgccgccggtttatgcctatgcggtggaaacggcgatccaactgacactgaccgagctgaacgagaacctgcgggaaatctacattgaagcctattccctgcccgaaacatcggagtatatctacctgcataccacggcagagctgaagcagatttttggtgaaaatttccccgatgataccgagagtgacttttacgagatggaaatcggcacggcgggactgatgcgcagctatatggcaagaaaatgtgatattcattttccgttggaacgcaagctcagccgttttctgacggcggcgatgcgggtgtatcgtgtatcggaggaagaacaggcaaaggtgcttgcctttattcagtcattagatattaaggcaatcgccacagaggttatgtataagctgtttgccatgttggaaatgaaatacgattttaagctgtcaaagaacggcgaaatggaggaaacaagatgaagaaacgattattcagtatcctgcttgctctgtgcatggtgctctgctttgtgccgactacggcatttgccgagagcgagacggaagaaccgcctgtttgcagctgtgaaacagcctgcacggcagaagcaatgaacacagagtgccctgtctgcggcgtagagggcgctttgccggagaactgtgcaaagtgcgcccagcccgcagacgatgcggcagtgcagccggagggggaagtgtctgacccccagccggaggggaagtgtccgacccccagccggagggagaagtgtccgacccccagccagagggggaagtgtccgacccccagccggagacagccttgacgtcgttaattggcggaaacgagacggcaaaagatgtcagcactgcggaagaactgactgcggctattgctgatgttaaattcgacaccgtcaagctgacaggggacattagcatcagcaactccctgaccgtcaaccgccctgatgtcacgctggatttgaacggctatactttgacatgcggtgatacggagtgcgatgatatattcagcgtgaatgaacacggaaatctgacggtaaaggacagcggtaccggcggtaaaattgacggtcaaaataacaactgcggcttcagtatcaacggcggtatcctgaccttaaaaagcggcaccatcataaactgcatgactgacggtgacggcggtgctgtggatatctcagacggcggcaaatttgagatgagcggcggcgctattacgaattgcaaagccagtgatgacagtggtgcggtggatatcggtgatggctgcacttttattatgaacagtggcaccatcagcggctgcagagcggatgacgatgccggtgcgatctttatcaagggaaatgcttcctttttaatgaacggcggaacgattgaaaattgttctgccggcaactacggcggtgcggtgaagatacgcaacaccagcagattcaccatgaatggcggcaccatctccagctgcactgcccagcaaggcggcggtgtatatgtagacggtagcagcaccttcaccatgaatgacggcagcatcgcgagctgcacggcggtgaatggcggcaacagtgtgtttgtcgtcaaacccagtgccagttttaccatgaccggcggcacggtggatggcagcattgcgctgccctacaaggtcggcaataacaccgtttacatggacggccttggcaccgcagcttatccctatcaaatcagcaccgccgaccagttaaagctgttccgggataaggtgaataatgtaacaaaggaagcagacacccaaatctgcgccgaattgacggaagacattgatttgaacggcgaagcatggacgccaatcggaaactataccgaaggaaatcagatttactacgagggcacatttgacggcggcggccacaccgtttccggcctgaacgttacgggcaaattcaggtatgtcagtctgttcggtgctgtaaaaggcggcacgattaaaaacctgacagtggcaggtaacgtatcccataattattattctacgggtctagactgtcacgtcggcggcattgtgggcggcgctttggatgctgcgacgattgaaaattgcagcaacaattgcagcgttactggcagcagtagcgattatgttggcggtattgctggcagtaatattaacaatgcgagaatcatcgactgctataatgttggcacaattaccggcacaattaagggaactggcggtgttacgggacttaacatgggcacgatctccaattgctacaatgttggaacggttaaaggtaattatgctgttggcgaaatcgttggcaataattctggcactgtagaaaactgctactatcttgccggtacgaacctgaacgcagttggcagaaacaatagtaatggcaacattacaaaaacagagtccaaaaccgccgcaaacttcgccaacgacacggtgctggcgctgcttaaggctgaccgcgacaattctccatgggacagctgccagtatgtggctgcggcaaaaataaccctgcccgtgttcaagggacagggcgacgcccatgaccaccagagtaacgactggaaatccaacgaaacggaacactggcaggtctgcacctgcggcgcggtgtttcataaggcggaacactccggcggcacggccacctgcaccgaaaaagcaaaatgcgcagtttgcggtgcggaatatggcgatgctctgggacatgattttactaccagttggacacatgatgataacgagcactggaagcagtgttcccgttgcgatataaaggatgacgtaagccctcatacttgggacaacggtacgataacaacagcgcctacctgcacaaaagcgggcgaagagacatatagctgcaccaagtgcggcgcaacaaaaatagagccgattccagccaccggccacagctggaagtccgattggacgtccgatgcaacgcatcactggcatgaatgtgccaatgaaaactgcgatgtgacggataacgcgggaaagaaaggctacgcggagcactccggcggcaaagcgacctgcacccaaaatgccgtctgtgagttttgcaaggcaagctatggcagccctgaccagaacaaccacaccgacctgaaacacattgacgcaaaggctgccaccgctgccgaagaaggcaacattgcgtattggtactgcgacggctgcaagaagtatttctccgacaaggacggaactaaggagattgcaaaggcagacaccgtgacggccaagctgcccccgaaaatcacagccggggatggtgcagcggtcacgcagggcgagaaaaaggaactgaccttcacttccgatgcatcctttgccgattttgttcgtgtagagcttgacggcactgcgctggaagaaaagaactatacgaagagagagggcagcaccatcatcacgctgaaccgtgattttgttgccacgctttccgtgggtgagcatacgcttgcgatcgtttctcaacacggtacggcaacagctaagttcaccgtcaaggcaaagccgacggaaacagcaaccccgcagcccacggtgcccccgcagcctacagcgcagccgacgccgacggtgcagcctgtttccccgcgcaccggcgacaccgctaaccccgcattgtggtttgcgctgctgattgtcagcggcggtgctgccattggtataacggttgccagcagaaagaaaaagcacaacaaataatggaatagcgtttccttgctccatcttccgagcaagacaaaagcgtcgtagcaatacggcgcttttttgttacccggaagtgacaaacagcggcttttggatggttggcggtagcggcagatgatcatgcggcgaaggagtgctgagcaacttaaaaggtctcaccttaaaacggatcgatgcaagatcgaacgttaatgatagcgcaaaagcagtagtattatgtgaatacgtcattcatgttgtgtgaatttctgttcttctccttgcaatcaccccatctgtgcaatatgaaacaaaatgggtatcagaacgcagcgtttggatgcttcgctctgatgcccttttacgatatagtttcttttacagcggcgacaacgattaccggaattccgtcgtctctttctgcaacactgcactccttttgattagcgtttttttctccacaccccttgcaaaccagaaaaaagcgcggtataatatgaccgaaagaaccaaaacggtcatatttcagggagggcgcgaccttggcttttaccgattacgaaactgagcagctccgcaaggcgttgctgaaggaaacgagacattgtgctgtcacgctggggatgaagaaaacctccgtagagcagctgacgaaggctgtcggtatcgcaaaaggctcgttttataaattctacgaatccaaggagatggccttcttcgcggttctggaaagtatccactccgagctttatggggtggctgaccaagcgttgcacagaaatggcggcctgccaacatcggagcgcgcggcagaggcggttctggccgtctgccggaggctgtctgataccggcgacatggttttcattgaacatgacgccaagttgcttttacagagattgccggagggcgtcaaaaaggaacattaccacgatgacgagacacacattcgtctgcttctggaaaaatatggccttgttcctaaacgggggatttcacttgccgccgcgacagtacgcggactgattctgaccgtctcacacaaggagcaaataggaggactgtacccgcaggtgctggaaacgctggtgtacggcgcttgcagggagttatttgaataagaggaaggccgcagagatgcggcttttccaaggcacatcggttagcacactctaactgtatgactgtgcgtgtcggttaggcaaatctaacattgaaaggaatgatagtgatgcagggacacaagaatttctgggacaaaaatgccggacgttacgaccgctttatgcgaaaggatcgggcggcgtatgacgagatgtatgtgctgatccggccggtcgtgcggcacaagacggtgctggagcttgctaccggcacgggactgatcgcaaagcacatcgtgaacgcggcggcacacatcgaggcgacggacgcctctgcggagatgatcgccgaggcaaagcgagatatccgctctgccaagctgcacttctccgtgcaggatatgttccgcctgccctatgcggaggcgtccttcgatgtggtgatcgtgtccaacgcgctgcatatcgtgccgcagccggagaaggcccttgccgagatccgccgggtgctgaagaacgatggcgtgctcatcgcgcccacctttacccatgcgggaaactcgttttccggcaaggtcagggcattttttatgaggatggcaggcttccctctctgcagcaagtggacgagcgcggaatacctgcgcttcctacggcaaaacggctgggcggtgcggaaaagcgctgttctgaaggcatccttcccgctgacctatgcggaatgtgtgaaatcggaggtgtgataagatgtcattttttgagaacaccagaaagcctgtggggcttggcgggaaaatcatggtcgccatgatgaacctggggcacagtcctgtggcccggtggggacttcaatttttagagcttgcgccggacgccaagacgctggactgcggttgcggcggtggggcgaacatcaagagacttctgaaaaaatgcccggagggtattgtcaagggcattgactattcccccgtcagtgtggagaaatccaaaaaggttaacgaggccgccatcgcggagggccgctgcaccgttctgcaaggcagcgtggcggatatgatctttgcaggcgactggttcgatgcggtaacggcctttgaaaccgtctatttctggcccgatctgccgcagtgcttccgggaggtttaccgggtgctgaagcccggcgggacattgctcatctgcaacgaaagcaacggcgatacggacaaggacaagaagtggacggagatcatcggcggcatgaccatctataaagaaattgaattaaaggcgtatctggagcaggcgggcttttacgatgtgcagatacacaaaaagaaaagctggctctgcattacggcgtggaaatgagggggctaaatcatgagtatctttgcatctatcttacgcagcgtatacaagctctccggcgcgaaaaaggcgtttgctttgccggaggatgcactgcgaaaagaaattgaaaagcagaaccggcatcgtggcgtttttacgcccaccgaccacaaggcgtattatgaaacgatcgcggcgcacaacaacgcgcagcccgagccgctgccgcagccgacctgtcggaggatgggcagctttgcctccgcatattggaattcaaattcaaaatctatcatcgcaaactcttttcttaatttaataccagccgaagaagaactgctgtcaagtgatggcagttcttctttttcggcaagtattcaagaagtcattaagtcgtgagtatagtcgaagtgatagaaaaattcgtaaagatgtggtataatacttttgattaaaaacaataaatgagaatttggaggtaaaaagcatgatgaagctcgataattttattaatatgatgacgggacactttaataacaaagagcagtttgataatatgcagagagaagggaaaacatatccttatgcagaacacattaatacaatctgtaatgagaaaattttgaaccttcctaaagattttaatggtaaatttgttgttgaagaaagctactatgagacaaatggtaaacgccatgcttccccacatcttttccttattacagagaaagaagacggaattgtgttgcattcttatgaaataccagaaggagaagataaaagtacgttttcatatgattctatgaaaaatgctgactacactgaattgaaaaaatctgaaaaattcactccggcgctctatcatgagaaagatggaatctgggaaggaggcagtacaagccagttttcaccggtaatgacatttaagctttgggaaaagttttctgatagttgtctggaggtatctgaaagcatggaagttaatggaaagaaaacttttggatatgatgaaccaattatctataagcgagtataatccaagaatgaaatattgcgataaattccagtttgccgaactgaatataaggatgatccgtctgcggtatgggaggacccccataccgcagatacttatcagccgcccatacagaccggtatgagattcccgtaaaaaataccacctatgttcctaaaacaaccacctatcgagaatcggtagaaatcagttcttgattttcctatactgtaaccgtagcgaggaggtgaaccgatgcaaattgaaatcaagatagacgaaaattgcaaagagccaaaaatcatcgtgatgacggacaaaatgaccgatgaagtcaatgcaatcataaaaaggctgtcagacgagcaaccgcaggtcattgccggattcagggacgatgtggtcgaggttctggaaccgtctgaaatctaccgtgtttttgcagaatcaggtaaggtgtttgccgagacaaatcacggcgagtatgcgctccgcctgaggctatacgaggcggagcaacggcttgacagcaagacttttgtccgaatatcaaactcggatattatcaatctgagaaaggtcaagagctttgatttgagctttgccgggacaatttgcattacgctttcaaacggtacggttacttatgtttcacggcgatccgtcgccaaaatcaaacaactgttaggaatgtgaggtggcagaaatgaagaaaaaactgattggacgaggtgtaattggtttccctgttggcattgcaatcggatatgtcattacggtgattatctcaatctgcattggggatggcttcttctatccggtcactccggagcttgtgaataaaatggggagcgaattaaatgcggttctccttcaaaccggtctgagcggaataatgggcacaggctttgcaatggcttcggttatttgggaaattgattcgtggagtcttgcaaagcaaagcggggtttattttgcaattgcttgcgtgattatgttccccatctcttattttgccaactggatgccccattcgaccgctggaattctgtcttatgtaggcatattcgtagcgatcttcctcgctgcttgggcaactcagtattctgtgtggaaaaggaagattaagaaaatgaacgaaggcattaaagataataacgatatgaattgatcccaccgctctgcatcctgcgctttgcttgaacaatagaataaaccacatacatagccgcttggttttcaaaagaaatcaggcggctatttctattttgaaggatcttttcgtttccgggtttgtcacggacagggcgggaaagcgggttcaaacgcggcataccttttcgttataatagaaccaaaggataattctgtagagcaaaagggggacgcgtatgaaaaatgggaaacgggcggtaagctttattctggcggtggtgctattgtgcacatcgtttgcaggatgcggcatggtgcagcaggacaaggcgtatttggagcaggtggcggcggccgtgacggagacgcagagcattttaaaggacgtggaagctgcggcggacgagctttccgggcagagcagcattgtgtacgagaattctgtgaatgcagagggctttgacgtgctggacgagtattatactttgtgcacggagaaactaaacgcgcttaacgacgcggtgggcgcggtgcggcagcagatgcagagcctcgagcgttgcgacgcgccgaaaaccgaaaagggcaaggctgtggaagcggagcagaaggcttactttgaggacgcacttgaggtgatcggcggcattcaggaggcgctgacattttacacggcgcagtatgacgctttgcagccgcttgtaacggctacggtcggcgaccgcagcgacgagcaggcgtacctcatttccgtttacgaggcggcgggcaatgtgaaaacggcactcagtacgttggacacgccggagtggctcaatgatctgtggccgaaatacgttgcgaaccttgatgtgatgacgaaatacatggaatcgcgctcgtggggccttgcatggtcggacgttttgagactgtattccgcaaaccagcttatctcgcgcgtgggcattacctccgggcagcacgaggaaacgatgttcgatttatacagccgcgaatataaccacgccgcgtttttgctcgatgagaacctcgacgcgtatgcggatgagattctggcggcctgcgagggaggcaaagatgttggcgcgtatgacgcgcaggcgccgatcgtgttttcggactactcgaccgttgaggagatttttccgaatttgtacccctcgatggactcggcgatcaacctgcttttatatacggacaagggctacaccgacgtgatggtgacggcggaaattgcgggctttacgcagaaatatgagcagaaagtgacactgacgccggagatgacgtatttgatgatcaagccgccggtgctcaccgatatgcccgacctttcaacgacgaaggacacgcagatgacgctgcgtgtggaaaacacgattacgggcgaggcgattattcaggagacgaagaacattgagctgcacagcgtatacgattataaaaattacagcgatgaattcggcattatccagaacgacaacatcttggcgtggatgacgccggaaacggacggcattttgcaggtgcgccgtaatgcggtatcgtggctggagcaaagcttcggcacggaatacggtatgctgccggggtatcagccggcgtacggctttacgtccgaccaaggcgcgtacatcacgtattatcaggtggcggcgatacagagcgctatcagcagcatgggcgtacgctacaacatggggccgtattcgttcagtgcgagccagcgcgttttgatgcccgacgcagttttagagaacggctccggaatttgcatcgaaacggcggttttaatggcgagcgtgctggaatccgcaagcatgcacgcgatgattgtgttcacgccgggacacgcgcagacagcggtggaaacgtggagcggctccgggcaatacttcctcattgagacgacgatgctgccgtttacggcgacgcaggacgcgctgcagtcgctcattcagccactgagcgcggaggaatgggcgaactacttgtacaacaaggagcaggaggcgcagcagtccggcggcatggtgtatgtggtggattgcgatttggcgccggtgctgaacattcagggattaaactactgaggagacaaacatgacacgaacgaaacgaatgacggcggctgtgctgacgcttgtattgcttttgaattttgcgggctgcggcgcgaaaaacgcgctgtttgaccaagtgagcggcgcgggaaaatttgcggcggaaagcctgacgatttacgaagaaaaaggaagctttgcggcggaaccgaaaacggtgcgggacgcaaagcaagcggaagaaatttttggcgcgttgaaagctgtgacgctcggcgaagttgtaaagacggacgacaaatacacgcggtatatttttacatttgcggacgcaagcggcagcaaaatgagctttacgctgcgtgaggacgggtgtgttgtattaggcggcaagacatatgatgcgctcggcacggacacggtgtttgaggcggcggggatagacccggacgaggagacggcggaatcaaaaacggaagcgtcctccgaagcttcaaatgcgcagacggagcctgaagtgacgcccgagccggaagtgaccgtgaccccggagccgacggcggaaccgacacctgaagcgacgtacacgttggttgattacgacggcggggtgttcacgatgcagctgccgcaggggtggcagattatgaccggcggcgaatacgcgggctattccatccgcgcgtgggacccgaatgacccggatgtgcagatcttctattacggtgagcttggcccgtactttaagagtgcggaagcgaaggcgcagtatcaatcgatgagcacgagcaatgacccgctgacatatttgccggtgctggaggacccgacgcttgcggggtgcttaaacgcgatggacgattaccaagacgcttacgacagcatcatgccccagagttttgcatttgcaaaaattcaaaacatgacagttttgagcgaaacgcccattacgacgccgcttgcaagctatgcggtttcggaagcttcgatcttagcgagccttacatcggaaacaggggcggcctgcacgggtatgtttgagggcagcattttagacgcgggcggttatgaaatcaacggtgtggacgtgacgccttcacgcggtgccgcgaacattttcggcatcattgcgccggagggaaaatttgagacggtggcgccgatcttgatacagtctttgacgagctttacatttacggacgagtacattcaggaagcgatacggcagggaaacatgcaggcggaaaacgcggccgaggtttcgcgccggaataacgaaatgatggagcgtgttgtgaatgatttttgcgaatatattcggcaataaacggcgattagcgccgcgaacgttgcaaaacttttaaccaccgttgacgcgggtggcggttaatcctcaacgtaaggcaagatcatgttttggaaggcgctgagcattttactgtggcgaatgacgaaatgaatagcgggggctttgcttttggacagcatgacccactcgttttcgtggatttgaatttggatattgcggaacgcgggtttctccgcaaaacggacggtgtagtttgggtgctgttcagcgaatattttggtggctttaaggtgcgctgtgtattcttcataggtgtacgtgacggtgttttcgatgaatgcgtttgaaagcgagagcgtgagggggcttgcccggaacgcttcttcgcttacatgcgggagctcgtcgatgacggtgtttacagtgagaatttgctcgatattttccgtttgctgtttgagtgcggcgttgatgctttctgcgtctgctgccgacatgccgctgcgctttagaatgcgtccgagcagatcttccggcatggtataaagcggcggagcggagagaatgttttgccgtgcgccgacggtggctgcgtcgtttttgaggaatgcgcggaacagatcggcctgtggggctttataaatttccattaaaggctgcgctttttgcagcagatggtctgcgatgcggcggctgtgctgcacctcttcacggttgtttgtgaaatggtaatggccgtcttcgtgaaagccgtttatgcactcgccggtgagcgcggcggcgccggagacgtaatgaaagtggcagtagacggtgttctgcacgccttttaagtagtacggcgagacctgccccgtcatgtaaatggggatccagctctctaacccgagcatcatttcttcaaacgggcggtctatgttgtggattatatcgagatgcagtccttttcggagcgcgacggcgatgccgaacatccattttttaccgaagtcgagatcttccgccatatcggccatgggcatatcgctgcacatgaaaacgggggcggcggatttggaaagcgcggtcgccttgaaaaaatcgagctcgccctgcttcatttcctctatgccgtagtaattgcgcgaggcagggagtcggaacgggagcgaaggcaccttaatctcctcaaaatgaatggcttcgatatattcattgaggtcgaaggtatcgagatgcgcgagaaatttggagacggactcggcatcgcgctgctttgcggtgcacagccactccatgaggagcgcagtgtagtgctcgggctttgtaggttgctctgcggatgtaccgacgagcgcgcagagggcttctttttggtcgtttttcaggcaccgccttgtgacatagcggcagacctgcgtgatgaattcctctgtgtttgcgggttttctctgtccggagcagacgcgggagaggtaggatgcgtcgaaattcatggcgcgggaaagctctgcgtagctgatgccgaatgcggtgagcaggtttttaaggttttgaacggcgctgtcaaaatcggatttttcggtgtgcagggaagcgcggagggtgcagagaacttcgccctccgaaaagccgggagaataatcgctttcggcggcgatggcgcagatgccctgtgcgagccgcagaagctgttcgctgtccctgccgggttcgcgctcgccggagcggtagcggctgatggcggcatccgatatgccggagacggcggaaagcgttttggcggagcagccgagtgtttcgatatataaattgagacggtcacaaaatttcatgcgggttccctccgtatgcttgatttaaggcgattataccacgcttcgaccgaaaccgccataagagaacgcagtgggttttgacattttccggcgtgtcaatgaccaaaccgggaaaacgcttttttcggttacggttgtttggtaggataggggatagaaaagggggcgggaaaatgaagcgatgcggttttattttgctgtgtgcgctggtcgttttgtgcgtgctgcttgcgggctgcgaaggaaagacggcggaaagaagcgaagccggcgaggtgtttgcgttttgcggcggcgaagcagagaatttcgcaaagacatttgacgtgaatgagatgaactgcatggaatatcgctacacgatggacacgcccgttttctgccgcatcacggacaaggcggcgatgcaaacgatttttgacgcactttgcgagatgaaaatcggcgaaagaacggacatgcgtgcaacggacagcgagcagagtttgacgtttgtgaaaacagacggcacgacgtgtatgatacggtttgagcagcggaacctgctgtatgaagaagacgcttatcaactggaaaatgatgcggcgctttggaaggcgctgcgcgaagtgaaatagaaatgggggaacgacatgaaagaatcgagagtatttgagctgaaccaagcgaccgcagagcaggttttggaggctgtgacgacgtttttgcgcggcgaaaagagcatggaggtgcagagcgtggcgacaccgaacgggtacctcattcaggcggcgcaggccgatacgctgcgcacgctttccggcatgaagctggcgacgacggtggagctcacggtaaacggcacgcagctcaatgtgacgctcggcgagggccagtgggcggacaagctgggcgcgggcgctgtggggctttttctgctgtggccgctggcggtaacggcgggcatcggcgcgtataagcagaaaaagctgccgagcgagatttttgaggtggtgtaccgctgcacgatgggcgagccaacgagcttccggacggcgggcgtacccgtaaatgcggcgccgacagctccggcgggggcagtctgtccgcagtgcggggcgcagatcttcgcaaacgcgaggttttgcagcgcttgcggcgcaaagctacaaacggtgtgtccgggctgcggcgcgccggtaaagccgggcagtaaattctgctcggaatgcgggcaggcgctctcttgatttatatatcccaaaacggcggcgtggagcttaggctttgcgccgccgttttttatgcgcatgttttgtaccgtgtggagtgaagcggttgaaatcttcggcgaattcttgtatgataagggaaaagaaaggcggggatgaagatgaatattacggtttatctcggtgcgaacgcgggcaatgaccccaagctgcaagaggcggtggaggcgctcggcaagtggattggcgaaaacgggcatgacctcatttacggcggctcaaaatgcgggctaatggggtcgatcgccgaaagcgtgctgcaaaacggcggcaaagtgaccggcgtggagccgcagttttttgtggactccgagctgcagcacgacgggctgacggagcttattgtgacaaaggacatgacggacagaaagacgaaaatgattgagctcggcgacgcgtttatcgcgttcccgggcggcacgggcacgctggaggaaattgcggaagtgatgtcgaaggtatcgctgaagcatttagacgcgccgtgcattctttataatctgaatggatattacaacgggctgaaggcgcttttaggccatatgatcgagatggggctttcgaccaaggagcggcaagagggcatttattttgccgacacattagatgagatcgaacgcattttagcggaaaagtgagggatatacatgccgaatattgtatggaacgcgaaggaatatcagcagaatttttcgtttgtgccgtcttacggcgaagcggtgacagagcttatcacgaagccgcagtgagcgaaaaagcgacacctgacggtttccggacttgtgcggtgggagttcgtccgctataataaaagcagaacgagcgcaaaggagtgctgctttatggcaaagacgaataagacaccgaaggcggaggacaacgccgagctgcggacgatctcgcttttgaaaattctgaacacatacagcgacgaaaaccacgagctttctacaaaaaacattatggataagctccaaaaggaatgcggcgttacggtgcatcgcacgaccgtcggcaagaacatcaagcagcttgcggactgcggctttgatatttacacgcacaagacgacgcagaaccgctattaccttgcgagccgcttatttgagatgccggaattgaagctgcttgcggacgcggtggaatctgcgggattcatcaccgaaaagaaaagcgaggagctgattgaaaagctttgtcggctgacgagcgtttatgaggccgaggttttgcaggaggggttttgcgcgaacaacgggaaatcctgcaatgagagcatttactacattgcggacacgatcaacgcggctattgcaaagcggaagaaaatttcgttttactattttcattacggtccgggcaagaaccgtgtactgaaaaacgacgggaagccgtatgttttcagcccatataagcttgtttggaatacagatgaatattacgttgtggggtattccgacaagcacgaaaagcttgtgagcttccgcgtggaccgcattgaccgttgtccggagattttagatgaggacgcggagccgcggcccgaaaaagaggagttgatgcggcatatccgcacgatgacaagcatgtatgacagccgtcgtgagcgcgtgacgcttttgtgtgacaacgcgatgatgaatgcggtggtggacgcattcggcgaagatgtggaaacaaaggcctttggcgacgacgcgtttaccgtggaaacggagacggcggcaagccctgtcttttaccgctgggtgttcggctacggtgggaaaatccgaatcacggagccggaaaacgtgaaaaaggagtatgccgaaatggtgaaaaacgcttttggaaatacgtgcggccggtgcggcgcgtaaagtaaacagcagtccgacctttggcagtttgatgcacaaaggtcgggcctttttttgtgttgaagacggaacgtgaatgtgctataatgaaccgtaagattttgggaaagggtccggcaatgtataactccaaacgattcgaaacggtgaagaatatgagggaaaacaagaaaatatcgaatgccgtgcaggcggccatcggcgtgctggccgtggttttggcggcgctgatcgtttggatgatggtgctggtctcgggcattcagggcacggcgcgcgtggtgaactatgcgggccttgtgcgcggcgaaacgcaacgccttgtcaaaatggagattgcgggtcaagcggaggacgagatgatggagagcgtggaatcgtttatcaacggtctgcgcttcggcgatgacgagcttacccttgtgcgattggacgacaagagttttcagacgaaaatggaagagttggcttcttgctttgaaagcctgaagcaggagatttatcttgtgcgcgaaaagggttttgagaaaaccgacatcatcgacaaaagcgaaaagtttttcgacgtttgcgatgatgcgacgggccttgcggaaacctattcgcaaaagcgcgcgtcctctttggcggttttggagcggtacatcacggcggacatcgtagttttgatgatgctgatcggttatgagtttatcaaggcgctgcactacaccgccatgaaccacgctttgcagaaaaaggtgtacatggacgaagcgacggggctgccgaacaaaaataaatgtgaggagctattgagcgcgccgaagatgatcacgatgcccgtgggtgtttgcagctttgacctcaacaatttgagacgcatcaacaacagcatgggccacgaaaagggcgatgcgtacatccgcatttttgcggagctggtgcgcgaggcggtgccggcgcattactttgtgggtcgcgcgggcggcgacgaattcatcgccattatggacggtgcggacaaggaagaaatgcagcggtgcttacagctcatccgcgaccgtgtggacacgtacaatgcggcgaaccccgattttccggtgagctatgcggttggcatttcggtctccgacgagaacgaaaactgcacaatgcgcgatttgtatatcctcgcagacaaaaacatgtatatcaacaaaaaccacgtgaagcgcgaggaagcattggccgaaaagaagctggatcgcagactgctgaaaagcatgaaaaaatacggcagcaacttttccgattgcctgtactgcgacgcaaggcaggacgcttacagggtaattcgtgcgagcgaggcgtttttccttgcggcggacggcagttattccggcgcggtggagcagattgcagaagaacgcgtggcgcaggaagaccgcaaggcggtgcgcagcagattacagctgacggcgctgtgcgaggcgctttccgaaaagaaccgcgtggtggaattgcagcacaagattttcggcgagaacagtgccgactacgggcgactgacggcgatttttgtggatgcagacccggacggcacgctgcaccatttcttgctggcgtttgagacgatcgacagtgtgcagccggagacggacgccaagcagcaactgacgcagtattacgagcagctgaagcagtctattttggaaaacgacagctacgtggatgcgatgctggagactgcggatgcggtatactccgtgaatctgacggatgatctggtggagcgcgatttccgtcgtgaacgcggcgcagacatctttattgaggacttgaaagcaccgtgtccgtacggcgaatattgccatcgtcattctatgctgattttgcccgaaacgatgggcagttaccggttgatcgacacggccgaaaagcttttggaacgctatgcgagcggagaaaagcaggtgacggtggaatactgtgagcgcgtatccggcagcgagacacgctggatacagaaaacggcgctgatgatgtcttcacgcgtatacgatgcgaagagcggtgaggaaaagccgatgatccacagccttgtgctgctgaaaaacaccacggagttccatgcacaggagcagaaggagcacgagcgcttgcgggctgaggtggacgaagcaacgctggcgaataaagcaaagacggagttcctttcccgcatgagccacgatatccgcacgccgatcaacggtgtgatgggtatgctggagattatcaagaaaaaccgtgaagatcatgagcgcgtggacgactgccttgaaaagatccatgtttcctccgagcatctgctgtcgctcatcaacgatgttttggatatgagcaagctggaatccggccatatggagccggagcatgtgccgtttgaccttgacgatttgatgaagaacgttcgcgcactgaacgaagcgcaggtggcaaaaacgagtattgtgtatacctacggcaagatttcgtttgcgcacgcaaagcttatcggcagcccgctgcatctgcggcagatcttattgaatctgttcagcaacgcggcgaaatacaataaagaaaacggcacgattgaaacgtatgcggaggagattgcctgtgacgaaaacacggcgacattccgctttacaatacgtgatacgggcatcggtatgagcaaagattttgtgaacaacgagctttttgagccgtttacacaggaaaagcagggcgcccgcacgcagtatcagggcacgggcctcggcatgtctatcgtgaaggagctcatcgagaagatgaacggcaccatcacggtggaaagcgtgctcggcgaaggctctgcgtttacggtgacgctgccgtttgaaatcgacaagcatccctctgcgcaggcggcggcgaatggcgcggcggacgaaacggctctgcacgggctgaaagtgctgctggccgaagacaacgaactcaacatggagattgcggaattcttcctggaagacatgggtgccgaaacgatgcaggcgtggaacggcaaagaggccgtggaggccttccgaaactccgcgccgggcgagatcggcgtgattttaatggacatcatgatgccggtgatggacggccttgaggcggtgcagcgcattcgtgcgctggaccggccggatgcgaaaacggtgccgatcatcgcgatgacagcgaacgcgttctcggaagatgtggagcgcagccgcaaagccggtatgacggagcatctctcgaagccgctgaatgccgaaacgctgaaaaaagcgatcttacggaacatataacccgtgcggtaaagacaaatattcgttaagggcggcgaagagctgcccttttttcgtgtaccgacacttgatttttctttttgttgtggtatactcattttggagtattagaatcaattctaaaacagggaaaagaggggtataaatggcaaaccgcaacgaaaaggaggcctcgcgcaagcgaattctttctacctgtgtgcgtctgtttttggagcaggggtttaagcatacaccgccgaagcagattttgacggaagcggatgtttccgcgggcacgttctataatttgtaccgcacgaaagccggtgtgcttaccgagctgaccgagttcatgtttcaaaatcagtttactatcgcggggcagattgcacagggggagacagatcccgtaaaactctacgcggtggagacggcgattcagctgacgctggcagaactgaacgagaacctgcgccaaatttacgtggaagcgtacacgctgccggaaaatttggaaatcatccacaggatgacggccgagatgctgcaccgtattttcggcgcgtatatgcccgggtacagtgtgagcgatttttatgagtcggacatcggttcggcggcgattatgcgcggatatatggcgcgtccgtgcgacgtgtattttacgctggaacgcaagttagagcgctttttgcagctgacactgcgcatttattgcgtgccggaggaaaaacagcgggaggttatggcgctgattgcgaacctcgacatccgtgccattgcaaacgaagtgatgcaaaaactgtttgccgcgcttgagatgcactatgaattcacgctcggcgaagaggcaaagcaaatttgattaaaaaagagccgcacaggcggatatgcacccggttttctgggcacaggttcaaaattgaaaaatgggtttccatcatggatgcttccctgaattcagaggaaagcgcaaatatttgttgagtgtgctgtcgaaattcattgaaaacagcaaaattctgtgctaaacttagagcataaacaccgggcggaatataacgtgcggaaaccattgaaaaggagcaattatttatgggtcttattaagacagctgtcggcgccgcgggcggtgttatggcggatcagtggaaagaatttttctattgcgaatcgatgccgaaagaggtgcttgtcacaaagggtgtaaagcgcacgagcgggcgttcctccaatacgcgcggcagtgacaacatcatcacgagcggctccggcattgcggtggcggacggccagtgcatgatgatcgtggagcagggcagagtggtggagctttgcgcggagccgggcgaattcacctatgacgcttcgagcgagccttctgttttctccggctctctcagtgcgggcattaaaaacacctttgcgcagatcggcaagcgttttacgtatggcggcgatgccggcaaagatcagcgcgtatattattttaatacgaaggaactcatcgacaataaattcggcacgccgaaccccattccgttccgtgtggtcgataacaagatcggtctggacgtggacgtttccgtccgctgctccggcgtatattcgtaccgcattgcggacccgcttttgttctacacgaatgtgtgcggcaatgtggagcaggaatatacccgcgacgaattggacagccagctgaagcacgagttcatcagcgctttgcagccggcgttcggcaagctttccgacctcggtttgcgtccgaaccagattgtggcacacaacacggagctggaagatgctatgaatacggcgctttccgcgaaatggggcgagctgcgcggcttgacggtcgtcagcattgcgcttggctccgtgacactgccggacgaggacgccgagatgatcaagcaggcacagcgcacggcgatgatgcgcgacccgactatggcggcggccacgctcgtcggcgcacagtcggacgcgatgaaaacggccgcgggcaactctgccggtgctatgaacggctttatgggcgtaaatatggctatgaatgcgggcggcatgaacgcacaggcgctgtacggcatgggtcagcagcaggcggcgcaggctgcggacagctggaagtgcgcgtgcggcacggtggtcaacggaaatttctgcccgaattgcggggcaaagaagccggataacgacggctggacctgctcctgcggtaaagtgaacaagggcaatttctgtgcaaactgcggcgcgaaaaagccggagggcttaccgaagtaccgctgtgacaagtgcggctgggagccggaagaccccgcgcacccgccgaagttctgcccgcagtgcggcgacccgtttgatgaaaatgaccgtgcctaaaagttgcaacctgcgttgaactgtgaggagatgagagcaaatggcggcaattaaagaatacaaatgtccttgctgcggcggcgctgtggaatttgacagtaaaattcagaagataaagtgcccgtactgcgacacggagtttgacaccgaagcgtttaccgcgcacgaggaagaagtacaaaacgcaaagcccgacgaaatggactgggagaccacggccggcggcgcgtgggagcagggcgaagaaagcacgctgcgcagttacgtgtgcaactcctgcggcggagagatcgtctgtgatgaaaacacggcggcgacctcctgcccgtactgcggcaacccggtcgtgatgatggggcaggtgagcggcgctttgaagcccgattacgtgatcccgttcaagatcgacaaaaaggcggcaaaggaagccttgcagcggcattataagggcaaaaagctgctgccgaagattttcaaaaaagagaaccatatcgatgagatcaagggcgtttacgtgccgttttggttgtttgatgccgatgccgatgcggatattcgctataaagcgacgcgtgtgcgcacctggagcgacagcgattacgattacacggaaacaagctactactcgataggccgcagcggtgatattggctttgaccgcgtgccggtggacggttcttccaagatgccggacgatttgatggaatccattgagccgttcaagtttgaggacgcggtggattttaaaacggcgtatctcgcgggctaccttgcggataagtacgatgtgacggccgagcagagtatcgaccgcgccaacgagcgcatcaagcgctccacggaagacgcattcgcttccacggtgaaggggtatcactccgtcacgacggagaattcttccattcgtctgcacaacggcaaggcaaagtacgcgctttaccccgtgtggcttttgaacacgacgtggaagggcaaaaagtacctctttgcgatgaacgggcagaccggcaaattcgtcggcgacctgccggtggataacgggctgtactttaagtggcttggcgggcttacggcaggcttcggcgtgattgcgctgattgcctatttcctgttctggctgttctgagggggtgcggagaatgaataaaaagcttttatcggtatttttcgccgttcttttatgtgtagttgtgtctgttccggcgtttgccgatacgacggaggactacacgccgcacctgatcgacaacgcggaccttttgacgggcgaggaagaaagtaatctgctcgcgaagcttgatgagatcagcgaccggctgagcgtggacgttgccgttgtgacggaagattccatcggcgacaagacaccgcgtgaatatgcggacgatttttacgattataattcgtataagtataacccggacggcgttctgctgctcatcagcatggaagagcgcgactggtacataacgacgacgggcagcgccattacggccattacggatgcgcggcgcggcaatatggaggatgcgtttttgagcgacctcagcggcggctactattatgacgcgttttcaacgtatgccgatatgtgcgacaactacatttcgggcgtgcagagcggttattatgaggaaggcgaggcgtatgaggagagcactgtgggggatttcccgtggggcccggcaattttggtttcgcttgccatcggcctcgtcgcggcgcttgtcgtgacgggctttatgcgcgggcagcttaaaagcgtgcgccgtaaggcggccgcgtcggattatgtgcgccccggcagcatgaacgtggcgtatgcaaacgacgtgttcctctactcgcacgtgaaccgcacggcaaagccgaaggacaacgattcttccggcggctccgcaacgcacacgtcgtcctccggcacgacccacggcggtggcggcggaaagttctgattttgccggcaagacgatgattccgtttgcgacctgcggcggcagcggtatgggctaatgcgttttaaaccatagctaaaccgtataaattcatagaaattaaatccgcatttccgtaaaaaccgggaatgcggatttttaattcttgttgtgaataataacgtaaaatttaagaaagaagaaaggaaaataggttgatttttggctgaacttcgtatatgattaaaatagaaacagtatatacggtatgttctgaaaattaaaaatggaggaactgttatgaagaaaaaactatttgcaatcctactcagcattgtaatggtagctggactcctgcctgccacagcactggcagcggaacccacagtctacgacatctgggtagacggcgtacaggtcacgtctgagaataaggataatcttttcagtggaacagtaagttatgacccggccactcacaccttgtctttgaacaatgctacccttgacaacgacaccatgtcagactacggtattaaaacgactatccccagtacgttgaagatacggttgaccgggacaaatagtattacccgaaccgatcccggcggaggagtgggaatatacctcaattacagcaattctgtcgagattaccggcgatggaacactggtgatcaacgttatcggggaaaactacgacggaattagcacaggggctgacgtcaagatttccgataaagcaaatgtcacaataaacgctgaaggcggattgggcatagccggaagaatggtcgaaattgacggggcaacagtgaattccaccggcttgtatgccggaatcgatgcccattggctgaagattataaacggcgccgatgttacgcttaaggcgactcaggacggacgtaacggagcatatatccggaaagatcaagaagggaacggcggcgatattgagcttgctgcatctaaagttaaagcaacaagctattatcccgctttgtttgccaggggcaatttgacggttaacggcggcgaggtaaactgtacctctactgcggacggtgcaatatgggcaaaaggcaatattttgatcaaaggaggcgccaaagtaatcactgacggtaaatcccccatgggcggtaacggtacttttaccgtagaagaagcagagattgacgcaaagaatacgaatgagaacaatacccctgcaatttccgatgaatgtgtgcctgtgattgccgatggctatcacctgaactatgcaaaagctgtagactcggaaggaacagaaattgacctgctttccagcggtactcaggactttgcaaaatataaaaatgttcattttatcacaaaggctgtctatccggtttctttcgttgtaacgccggacggtctgaccaatgttgttgttaaagtgaatggtcaggaggttaccggctctgtcagtttggaagcaggaacttaccctgttgaagtaacagccgataactgcaaagcatacaccggcaatataacgattacgcctgatacggcaacgcacacgcagacgattgcaatgacttatttacctgccgactacacgaaagtagacgcagccattgccaaggcaaatgctttggaaaaagataactacaaggacttttctgctgtggaagaggcgattaacgcagttgtgcgcgacaagaacataacggaacaaggcgaggtagacgcaatggcgaaggccattgaagatgctatggccgcgttggtgaaaaagcccacagaggctccgaccgcgacgcctacggcaacacccacggctgcaccttctgcaagcccgacggcggctccgactgcgacgcctacggtaaaaccgacggctacgccttctgcaagcccgacggcggttccgaccgcgacgcctacggcaaaaccgacggctacgccttctgcgagcccgacggcggctccgactgcgacgcctacggtaaaaccgacggctacgccaactccggcgccgaaggcagaccccaataacccgaagacaggcagcagcaacttgccggtcgttttcggcagcgcggcgctcgtgctgagcggaggcgcgcttgcagcggtgctcatctataaaaagaagagacacgaaaagtaaagtgaaaacctaaaagtaatgaacccccgccccggaaatcggctttgtgccggtacccggggcgggggttttacattcttattcaaaaaatatttacgatttacacgacaccgtggttgacacccgtacggacccgtgctaaaataaaatacgaattcgtattttagcgaggtggagcgaaatggagcgatatgcgtttttccgtcagcttggcaaggcggtgtacggcatagatgcagcttacggcgtgttctcgaaaaatgcgcagatcaaaccgaatatgctgtggctgctttcggcgctgaacgacggcgaggggcacacgcaaaagcagatctgctgggactggggattcccgaaaacgacggtgaacacgcttatcaaagagctggaaaagggcggctttgtggtgcagagccccattcccggcgagcgcagggagctttccgtaatgctgacagaagcgggcagagactacgcgaatgaggttttaaagcccgtgtatgaggcagaggagcggctttttcggctgtattttaaagataaagacccggaatttgtacaggagctgttccgtttttccggtgtgatgcaccgctattttacaacaggggaatttgaagaaacggggagcgagacatgaaaaaattaagctggcatgaactgaagccgcaggtgaaggaagtttgggtactgagcctgccggctattttaacgcagatcacaaccatcgtgatgcagtatatcgattccgccatggtgggttcgctcggcgcgaacgcttcggcggcgatcggtctggtatccacgagcacatggctgctgggcggcattacatacgccgtttcggcgggcttttccgtgcaggtggcgcataacatcggcgcgggacgcgatgcggaagcgagaagcgtggtgcgtcacggcctgtgcacggcgctgtgcgtggcagggattttgtgcgcgttggggctttccatccacagtatgctgccgacgtggctcggcggcgacccggctattcgttacgatgcctcgaaatacttcatggtgtacgcgttgatgatcccgttctcgcagatcaactcgctgaactcgtcgtacttgcagtgcagcggcgatatgctgacgccgagcattttaaacgccgccatgtgtttactcgatgtggtgttcaataccattttcattccgcatttcggcgtgatgggtgcgggcatcggcacggcgagtgcgtgtgcggttatcagcctgacgatggcgtggcgctgcctgttgtgcaacccgcatttgcggctcaaccgcaaagagaccgaaaagcacggctttgacccggaaattctcaaaaaagctttgaaaatcggtctgccggtcggcgtgcaggagatcgccatgtgcagcgcgcaggtcgtcgcgaccatgatcattgcgccgctcggtgcagtctccatcgcggcaaactccttcgccgtgacggcagagagcttgtgctacatgccgggctacggtatcggctcggcggcgacgacgctcgtcgggcgcaacatcggcgcgggaaagaccgaccttgccaagcgctacggcaacatctgcatcgtgatgggcgcgggctttatggcgataacgggacttttgatgatgttcctgtgcccgtttgtattcagcattttgacgcctgatctctccgttcgcgcgcttgcggcgcaggcgttgcgcatcgggttgctggctgaaccgctgtacggcgtttccatcgttgcggcgggcgcactgcgcggcaccggcgataccttcgtgccgagtatgatgaacctcggcagtatttgggtggtgcgcatcgggcttgccctgctgctcgtcggcaatttcggtttgccgggcatgtggacggccatggcgacggagctttgcgtgcgtggccttttgatgctgtaccgtcagaaaacaacaaaatattataaaaaatataataaaacaactgaaacgagcgagcctgagctgttagaagctgcggaaagctgaaaagcgctgcgaaaggacgctcaatacggaaaatacggagcatacggtaacggcgccgcacagggtaaattatctctgtgcggcgccgttttgcttgtgattcaaattttaaagctgtgggtagatctcctcaaagacggcgcgcagcagtgcaccggcatcgcggctttcggcggtgacggtgacaacggcatttttgtcgcgcatcaaaatgacgaactggccgtatttgccgtcggcgcggaaggaaccctcggggcctgcccagaagaggtagccgtaaccctcgctgccgttttcgacctgttttgaggtcgcttctttgacccactcggcggggatgagctgcttgccgttccattcgccgttttgcaacaatagctgaccgaacaggtgcagttcgtcaatggtgaggaacagtccgcctgcaccgaaggtctgaccgttcgggtcattttcccatgtgggcagctgaatgcccatcggcgcgaacatgcgtggcatcaggtaatggacaaggtcgcagcccgcgcggcgctgcacgagaatgccggcaaggtatgggccgacgttgttgtacacgaatttttcgcccggcgcgtacacgaacggctgacgaagcgcaaggcgcacccagttgcggtcttcatagtacgggcgttcgccgcccattaaaaagcttttttcctgtccgagacacatggtgagcaaatcacgcaccgtggcggcctttaagttgtcggaaacgatttcgggcaggtcatccttgaatgcgtccgtgagcttttcgtcgatggagagcaggccctctttttgcgcaatgccgactgccatagaagtaaagcttttgcttgcggaatacacattgcggcggcaggcatcgtcccacagtttgcgggccagctgcatgccgttttgcgagaccacaacgccgagtgcgcgaagcggcactgcacggctttcaaattcggtaagatcgatcatagtaaacgcctcctaaatgaaatcgagttggtgtaaagggaacgaataaagtctttggacaaacaataccacaataaaaatgccgatgcaagtatttttggctaaaataagattttcggagaaaatttgaagtttttttaaaaaaggggttgacatattgcacttttgagcttataatgatgaagctgtttgagaaatgcgcttgtagctcagctggatagagtgactggctacgaaccagtaggtcaggggttcgagtcccttcaagcgcgccaaggaatccacaaagatttcggtctttgtggattttttctgttttaagatagattttatcggttaaaagatttataaagctgaatgtatttggtcgattcagcaagttacttttgtcttccgaccttgtgcgaaagaaatacgcatttttacttgccacatcttgcatctgtgtgtataattagaaatattattctgcgtttttcgactttgcctgaaagaaaagagaaaaacgcatcaaatttgagaaacgaaagttggaagatcatgttagagatcatagctgccgtaaacaaagcggtgaacgattttatctggggtgttccggccatggtctgcatcatcggcgtaggcttgcttttaagcttccgcacgcgctttttgcagatccgcaaatttccctatgccatgcgcaccacggcagggcgcatgttccgcaaaaaagatgcttcggacggctccatgacgccgtttcaggctgtatgcacggcgctggccggcacagtgggcacgggcaacattgccggtgtggcgggcgctattgcgataggcggcccgggcgcggtattctggatgtggtgttccgcactgctcggtatgtgcacaaagtttgcggaagttacgttggcggtgcattttcgtgagcgcagcaagaccggcgagtgggtcggcgggccgatgtattacattaaaaacggcctcggtaggcactggcaatttttggcggtgctgtattcgctgttcggcgcgctgacggtgtttggtaccggaaacgctacgcaggtgaacaccattgtaaccgctatcgatacggcgctgacgcagtacaatgtgatcggcgcggaccacattcccacggtgaaccttgtcatcggcattttatgcgcaatgctcgttgccatggtgctgctgggcggcatcaagcgcatcggcagtgtgagcgaaaagctcgtgccgtttatggcgcttttgtatgtgcttttggggcttggcgtggttgtcctgaacattacgcgtctgccggaggtactggcatcgatcgttgttggcgcgtttaacccgaaggctttcacgggcggtgccatcggcagtctgttcatcagcatgcagcgcggcgtttcccgcggtattttctccaatgaggccggcctcggcacaggttctatcgcgcatgcctgcgccgatacgaaaaagcctgtaaaacagggtgtgtttggtatttttgaggtgtttgtcgataccatcgtcatctgcacattgacggcgcttgtcattttgtgcagcggcacggcggtgaattacggcaccatggcgggcgcagacctgacgatttccggctttacgacgacctacggcagttgggcttccattttctctgcggtcgcgctgtgctgcttcgcgttctcgaccatcatcggctggggcctttacggctcgcgttttgtggaatttctgttccgcaccagtaaggccgtgcgcccgttcctcgtcatttattcgttcgtcgcaatcctcggcgcaaccgtcaaccttgacctgctgtggaacatcgccgatacctttaacggcctgatgagtattccgaatcttatcgcgttgttattgctttccggcacggtggtgaagctgacaaaggaattttttgcgaaagaagacgggcgtaagctcaaaaaataacagaaaaataacagatagtatgcggaaaatcgccggggcaagtgcgctccggcgattttttgtatgtgaaaatgtcgtagagtcgcccgtgccatttggtgagtttgttagaaaattgcaaaatatggcagaaattgccgaaaaactatttaaatgttcaacggattacgatatactcttgtcaagaagttcgttcggcgcagagaggggacgaaaacatgaaaaaacggcgatattttgcgggtgctgcggcaattctctttttacttttgctttgcggatttgccccgcagagcatcacggaagacaaggatgcgcaggttttactgtatgaaacttatggtgaaagcgagatactggtctacaccggtcgtacgacggtgctgtatcgcccggacggtcgttccgccgaagcaccgtttaacgggcaatatgccgttttgcatggcgataccgtaacggttttcgccgaaaccgaggagttccttgccgtggagcgtttcagtgcggaaacattggaggaaacagacctgttcgctttgcctgtgacgagcggcctgcgctttgcggaaagcgacagcgcgggcaggctttatgctgttacctacggtgcgccgagcacattgcaagtgtttgacgcggcgggtgagcccctaacggaattcatatttgaagacaaaatattcggcatacagacggtggatagtacgctttatgtgctgctttcggaaagtgccgtgcagatttcgcttgcgggaaatgtgccgacactttccggcacggcgtttacctatgcgccggctgcgcggccgtataagctgcttggcagcgacgtgtacgtcaacatgcagggcgaagtgcgcctgttttccggagaagagtgggcggaagacacgatcgtgacggaggccgttttgagcggcgacatgctctactggctttcggacacctcggaggtctcgcgcgtgcgccgcggcgacaaggcggagttattcacgctttccggcgaagcggctgcactcaccgcaaatgcagcgatcatctggcaaaacggcgcactgtgcagagagtcgttcggtacatttgtgcagcctacgcccacaccttcgcccatcccgacacctacgccggagccgaccgcgaccccaaagccctctaaaacgccgaagccgacggctaccccaaaatcgagcacgacgccgaagccaacggctacaccgaaaccgaccgccacgccggatccggatgtcacggcgaagttgcgtgtttccggccacattttatacgcagaaccgggcgttacggcagcaaagctacgggcagcattcccacaggcggaagtggaagtgtacacgtcatcctccgcagcggcctccggtaggctgaaaaccggcatgagcgtgctgatcgacgacaagctgtatacggtcattgtgcccggcgacatcaacgcttccggcaccgtgaatacggccgatatgcgtcttttgcagcgtgtgctcgtcggggagacggaactgaccgacacagccgcgcttgccgccgacttaaatgaaaatggcaggcccgatgccgcagaccttgttctgctcgacgccaaaatgcagcgggactaaaccgcataaaatggagatgccatctcatcgatgcagacaggattgacatgtccggcgaagtaagctatcacgccgttgaaaactcgaagctttctaagccggacgtgatggagttactgcaatatcccatcggtgtgacacttgaagcagacggtcgataccgtgtatttctgggggcgtatcggttttggtatttgagggaatgcctgcactggacaaaaatcccgtgctatgtttacaaggtcaaacggcagatacgtgatcctcgtgaacggcgccgccgggaaattcatcgcaggcagcaggcggcagaaagtccgcgtatccggctccaactctatgagaattactacaagctactgaaaggcatgaaggacgcaggtgaaatcaaaggcggtttacagacgcggctgatgcagcttctcggcgtttccgaacgcacggtgcgcatttataagcagctctcggaacagcttaccgggcgagaaaagcagcacttaatgcgcggtaagctgccgtttgtgcaggcacgtgcccttgccgcagagagaaatcaaaaagcggcaatgttgccggattttgaaaaagcagagaacaacaaagataaaaacctacctgccaatagtggtgagtaggtttttccattttaaaaagcggcaatattgccgcttttgctccgagaaatttgttgcagcgacttatttgcatttcgtgttattgaacttaatgagttttcacacgtgggcaataggaaacatacaggggtaatgaacttgttatgcaaatcttgaaaaatttcttgattttttcactgattttgaatacaataatatcaaatcaagatttactaaatctaaatttgtattacttggaggtgtgcgatgtttatcgggagagagacagaattgaaattcctgaatgacaaatattcagagaatggcggtcaactcattgtgctgtacggcagacggcgtgtaggaaaaaccgagacgctgcgggaattctgtaagggaaagccccatgttttcttttcctgcacgcaaacgactgatccggtacagcttcgtaacttttctgctcggatgctgagagaagacattcctgcaaaaagctatattactgaatttaccgattgggaaagagcattccgtgcggtacgggagttaccatacggtgaccggaaaaagttgttggtgatcgatgaatttccgtatatgtgccgtggtaacaagagtattccctctattcttcaaaatctctgggatgcggagctgcgggatgccaacgtaatgattatcctttgcggcagtgccatgagctttatcgaaaaggaattgctggcagagaaaaacccactttacggcagggctacgggtatctacaagatgaaggaaatgggattttatgatgccgcaaagttctttccagattattttgaccgtgataaggtgctggcttatgctgttcttggtggtatcccacattatctgcgccaatggaatcccgggctgtccattgacgagaacatcaagcgcaatattctgaccaaaggctgcatcctttacagcgaggtggagtttttgttgcatcaggagctgcgggaaacacctatctacaactctatcattgaagctgttgcgttgggcaataccaagctcaacgacatcagtcaaaagtcgcttgtggaggatacttccaaaaccagtgtttacttgaaaaatctcatagagcttggtattgtggaacgggagttttccgtggatgctaagaccaaggaacaggcaaattccggtcgaggagcctatcgtctgacggataacttcttccgtttctggtatgcctttggttttgcaaatttttcacagcttgaggacggcgatgtggacggcgtatacgagtatgttgtaaaaccggctctccacaagtttgcttcctttacttttgaggatatttgccgggaatttgttcgtgaaatgcagaagaaaaacgagctgcctttccgttatgcaaagatgggacgttggtttggaaagactacggtacgagacgagaaagcggcttccggactgcggacagcagagacggagattgacatactctgtattgaccgaggggcaaaggaatatctggtgggtgaatgtaaattcaaaggcgtaccgttttcttattctgagtactgtgacacggtggcaaagctttctccgctgaaagaaaaagccaagtttcactatgcactattttctgaaaacggatttgacaagaaaattatcgatcatgcggcagaaaacgaaacgcagctctatacccttaaccaaatcgttcattacgcataaaaagcagaggatagcaaaggtaaaacctacccgccgatagtggtgagtaggtttttctgttttaaaaagcggcaatgttgccggtttattgctgtacgcttgaaagacggcacatttgctcgtagagggatgtgtgatccgggtggacgtaccggcggagcgtaaaggccgggttggagtgaccgatgataagagcaaggcttttagcatccgagtcgttttcaatcattcgggtcgcgaaggtatggcgcagcatgtgcggcgatacgcggcgaattccggcgcactttgaagtgtgttttcgatttccgggaaacgccgcgataacctctttcgggcgtcccgatagatttcgagcgttttcgaggcatattccggcacggcgtatacctcataccaaacatccagctattctccgatggtgcagacttttctttccattgtaaacctctcctgttagataaaaattcccgttagggttaattcagtttagcagcgaaaggaaagaaaaacaaaaaccggcaatgaaaaagtaaatttttgattgatttaagcaaatgctattacctatttttcataaattatattgacagctgtaattttatgtgatattatgaccataaattaagggatgggtcgacacattccttgcaaaatctacataatttaaggaggcgattgtatgttaaagaaaaggcttatagccggtatggcagcctgcctgatggcggtttctgcgttttctatgtctgcgagtgcgtatgggcaggaaagaatgattgcgcgtatttatcaaggcgcaacggtttcctcaaattcagcgaaaaaaactgcgtcaggtagatttgcagtgacacccaccccgtacggtagtgatggctggagcagtaaaggggatgagtacgtttattttcgtgggcgaacagattctggtgaacaggcgacggtgcttaggcgtaaatcctataatggtacctcatctaccgaatggataaattatttatcaggaaaagcaagtgttggttcttactataaggttgcaatagaatacgacaacacaaatccttatgaatatgttgatctgatcgttacttgggttccgtaaatttatgcgtgtggagactgctttgcagtctccacgcaaattactttagggagagatagcatgaagaaatacataataagcatttttgctttcttattcttgggttgtatactgtgttcttgcacaaaacaaatacagaatgatagttcaatgtcatcttctgtaaatggggggagcatgtcatcagaaatgtttgaaggtgacaataaaagagaaaatgaaaattccgataatactgcggcgcacactaccaaaacgttatcttcaggcgttgtggtggatgcagacgtgactgtgcctaaagcgatgcggcaggaaaatttgccggagatgcaaggtacgggacagatagtagagtttgggaaattaaagtcaattttttgcgcggacaaaactataatagaagaaaatgaaagcaccgtggttacaaaaagtttaggctctgatatagatatggagcaatatatatatactgaaaacggagattatctgacatgcgttggaggtaactcattcctttatacggcagcacgtgatacgcaggatacatcaaatttggagctgtataaaaccggcgaagacctcgactttgcgacgattgcggaagcggacggggagatacggaaagtggcggaggagctcggaatttcggttggggacagcgtgtgctataccatcgatacgagctcgatgccgcactatgttttccggtacgacttgcttgtgaacggactgccgctcggcaaatttgacggcggcagttacagcgataacgtatttacaccgggtacatacctgacggcggtgttggatgaagacggcattcggcactttgatgtgtcttatgttttaaaggagacggagacgggcgacgcgcagcgcgtgctgacgcttgacgaggcgctcgacaaagtagacgagaagtataactccattattatggagggagattactatatcaacgatattcaaatggcatatacgccgatcaagacggatgatgcggggatcgtgcggttaatcccagtttggtattttcagactacgcatcaaatcttgctgccggacaaatccggtacgggagagattatgttgccgcaggacgggtatattctgataaacgcgctggacggcacggagcttttacacgagaacggagagatatgagatgcatatgcgtgtgtttttgaatgttctgaaaaatgaccttgcacgcacggtgtgctcgaaagcgtttgtgtttgccgcgttggggctgacggccgcgacgtttttgaccggcatggatgagctttcttatatgacgccggagaatgacctgatctacatttacggtatctttcagtaccttgattttcagcttttgtatttgctgtttgcggcgatacccggggcggcgctgttctgcgcggactgggagaaccgattcatccgcttttcggcgcagcggtgctcgaagcgcatatacggcgtatcaaaaggcattgcgtgctttgtctcggcggtgctggtggtcacggtttccgagtggctcgatctgatgatcttacggctttggggatttccggcggtgaacatggaaatggcaaatcaaatggcgctgggcgcatttgacgagatcgggtattccgagtgggtgtacctttattttgcggcggtgattttcattaaggcgtgctgcgcaggagcgtttgcggaatttgcgctgtggctttcgacgaagatcacgaacgtattcgtgacactggcggcgccgatgctggcgtattacgttttgaacacactgatgatgtggctgcgtatgccgagcaaattttaccccggtatgctctctaaggggttttcggtgttcggcggcgcggggacgacgacgcttgtgacgtgcggaatctttgcagcgttcggcgtggtgttcctcgttttatttacgcgctcgtgcagaaggagacttgaaaatgggtaaggctttcgcttgcttttcgattgcgctgcacaactttaaaaaatgggcggtgaacccgcggctgtacattttgctgttgatggagatcttgtatttgcactcacggctttcgccggtgggtgagctgtgtacgcggacagggtacaaggtcacgccgtatttgctgccgtttttgctggacgagggcagtgcggtgatgatgctgttcctcggtgtggtgctgctgttttgcgatgcgccgtttattgaggacgagcagccgtatattatgctgcggagcgggcggcggatatggttcatcgggcaaatgctgtatatcgtgatggcgtctgtgctgtattttattgtgctgtatttcataagtgttcttgtgctgctgccgcatatcgaatggagcgcggaatggggcaagctgctttctacgttttcgcagacatcggccgcggggcagaacggcatcagcattccgtttgcacgcgtcatcacggcgcggtttgacccaattccggcggtgctgcggtgtgtggtgaacgggagcttggtagccactgtgctcggtatgctgatgttcttcgtgaacctgaatatttcccgcacggcgggcggcatctgcggcacggcgctcgtgctgtggaacatggtgacgtataagacgtggtattggtttgtgaatatctcgccggtctcgtgggtgaacctttcccgtgtggattacgacggcagctcgatttacccgagccttacgtatattttgttggcactgttggctttgtttgcggttttgtcggtcacttcgtgggtgacgctgcgcaggcggaacattgacgtgctgaaatcggtgtgaaaggagttcctatggaaacttgtattgaagtacaaaatgtggtgaagcgttttcgcgaccaagtggttttgaagaacgtatcgatctcgtttgaaaagggaaagatacacggcattgtggggcgcaacggctccggcaaaacggtgctttttaagtgcatctgcggtctgatgcacccagaggagggcgtgatcctcgtgaacggcaagcgcgtgggacgtgacgtggacatgccggaggacattggagccattattgaagcgccgggctttctgccgaattacagcgggtacaagaatctgcgctttttggcgaacatacggcggaagatcggcaaggaagagattttgaatgtactgaagacggtggggcttgaccccgaaagtcgcaagcatgtgggaaaatactcgctcggcatgcggcagcgcctcggtattgcgcaggcaatcatggaagacccggagatcctcattttggacgagccgatgaacggactggataacgccggtgtgcaggatatacgggcactgctgttggagctcaaggcacaagggaagacgattttgctcgcgagccacaaccacgaggacatcgcggcactgtgcgatacggtgcatgaaatggacggcggggtgctggaataataaaggctacaagataaaacctgcctgttttagaataggcaggtttttgctgtaatctttgagtgtttatagatatgagaatgttaaaaaagaaaggcggctgtttccaactgaaagcagccgcctttaatatgggatttgagtgaaaccttgtacgcaaattaagaaatgttaccgtatttatcgcaggtgatacttaaagaaagcgttctgtttttccctaaataataaactgtaccggaaccgtatacggttgcacctgagcgggaagaagttttcgtaacataagatgcagagttatcgtagatagaaacagaaacactctggcttgtagcagtgcaactcacgttgtacgtataattaaaattaccagtcaacgagactgcaaaaaccgctgtattgcttgccgtgtaataggtggatttttttgtatatgatcttgccgttcgtgcaactgccggtgttacttctaactccgtcacgatataactgccgtcttcaaggtattcgactgtttgcatgttctgcgatgctgtttctgatgcagatacacagaaaggtacaataccaagtaaaagtgttaaacaacagataattgttaatatacgtttcatttttttgcctcttttcttaataaactctcgtgccttccggctctgggggcggcgttccttcgacttcttcataaagtcttgtaacgatatacccatcctcgaactgtcgttcccgccagttatcaaacagaatatatcccaaaacgcacacaagagcaaatacaactgtggcgattacaaaaacgcgcacagcttttcggtgcttaaatgttcgttttacttcattgtacggttcagtgctcagaaaattttcggctatgctttgtggtgtgccgaaatgtttttctaagtcattttcggtcagcgtagttgttgcgctatcagcaaaatcttccatgtcattttgcagtcgctgcaaaaactgctttttcttctttttgtcacacgtcatttctttgtctattcgacgcaaatagtcgtggacaacatatacggtttcgctcatcccatatccccccaatttaagaatcaagaatgttatgaattccttgctgaacggtttcgtaatccttttttaaagatgctaaccgttcacgcccggcattttcgatatgataaatcacacgcatacgggagcgccccgtgctcatgcgtgttacgatctcctgaccggtgatgtacccatcgtctgccaagcgatacagaagcggataaaatgacccctcctgcactgtgattaaacctttgcttcgctctttgatcttctgcacaagctgatagccgtatgtgtcttcttcacacagcaaaaacaacgtgagcatttcgattgagccttttttcatggtatcgacagccatagtggagatacctcctgtcaagtaatagattacagtaaaacgatttataagtcaatacctattttaaataatttatttgacaaataaaaattgaaatgctattatgatattggattaatctcattgaaagaacgaagaaattgtaattttacttgattggagatgagttatagtgcttaaggaagaattgtatcaacaatatttgcaatggaaaaaagaaaaaatcgcgtggtcaatagaagaaatatttgggtttccgaaagttgattgcgatgtatacgaaaatgaagatgttttagttagtcgccttttttatgttattcccgatatttttgaagtaaagttacgcgtgttcattttttacgaagaaaacacctttcttaagacaaaaggcgatgacttaaaattgatccacagtgaactaaaaatacaatagttgatgcataaaggaaaaccggcaatgttgccggttttttctgtgtgaatgtaaaacttgccagataaaagaatttctggtagaattttaaaggaccgtgatagcggttcgggtgctgccataacggtggacggttcagccctcagatacacttcggtgtaccgtgtgagggaacatttcttgaatatgaaaaaatccctcaatccaacacggagagagggatgacgcttatgaagctcgagctgaactttagcgatttgtgccagttggcacttgtcgttattgcgttgatcgaactgtttcgtgatcgtaaacataaaaagagatgagccgccctgcccaaggtctcggctcatttctttaagctgaactgagggctaaccgttcatcggcagcactctttctatttctaattataaacgcttctgaagttttgtcaagcgcaaaaaccggcaatgttgccggtttttgttagacgagagaaaaggcggggcgggttacgtaatgagcaaaaccgcgacaccttgttgaaaaatgcagaaaaaatcttattttgcgttgacgagcgggaaaagaagtgctatacttttaggcagaaataaagaaaacgtccgctacggacgcttctcggtcaataaaagatcgccaaatcttttattgattccagatgtacgaccatctgaaaacttcgcgaaaagacgccgataggacgttttttacaagaggggtgcttcatgtctaacacgttagttagattatagcacaagccaaacgatatttcaaggcttttcagatgcttgtctggagagccttttttatttctgatttcgcaccttgaaaaccgaatgaacccacaggcgagaatacccggcgcaaatcagtgtgcatttgcatgcctttgcaatgggaaatacttggtatacaggattggacaaacctaatctgcctcagtaacggcgtttgagaacgggtcgctaaaatcaggattattaaaacgaaatactttgttttaatcgatacgcacaaccgaaacgtaagtaacagttgtgcgtatacattagaacaaaatatggtgggcgctaacggacttgaaccgctgaccccctgcacgtcaagcaggtgctctagccagctgagctaagcgcccaattttctgttgctcgattattatatagcaagtccccgaaaaatgcaagtcttttttgcgaaaaagttaaaattaatttttctttcgtgaatatcacgaaaaagtgcgtaaaatttggtgcactgttcgcagaaatttaaggtttcttacaaaactcataagaatcgcacatttctattgtttattccttttctatgccgtataatgaaaatactgaaaactgtgaatagaatgtgaatgaaagcggatggcggttgcgcattgcgctttgaatacggagatttagacagaagcggaaatctgaaaacagacgatgacgttggtcctgcaccaaggccggaaaaggagaaaccatgaaaacactgtcatatgtgaactttatcatttctattttatttatggcttgctacgcgtaccaggcggtctaccttgtggcggcgcttttaaaaaagcagaaagtcttcaaagcgaagaagctgcaccgctacggtgtgctgattgccgcgcgcaatgaggaagccgtcattgcgcagctcatccgcagtgtgcgcgcgcagaagtatcccgaggagcttatcgatatttttgttgtggcggataactgcacggacaacaccgcgcaggcggcgcgcgaagccggtgcggtcgtttacgagcgccacaatacgtatgccgtgggcaagggctatgcgctgcgtttcttattagaaaacatttttaagaatttcggcgaatatgcctacgacggttttttcgtctttgacgcggataatattctggatgagaattttatctccgagatgaatcacgtttttgacaacggctacaaggttgtcacgtcctaccgcaactcgaaaaactttggcgacaactggatcagcgcgggttactccattttcttcctgcgcgaagcgacgcagctcaatcgcgcccgtatgatgttcggtaccagcagctgcgtttccggcaccggctttttgttcagcagcgagattgcacgcgaaaacggtggttggaagcatttcctgctgacggaggactttgagttcaccgtggaccgcattttaaaggacgacacggtcggttactgcgaaaacgccattatttatgacgagcagcccacgcggcttgggcagtcctttacacaacgtgcccgctggattaagggctatttgcaggttttcagccgatacggcttcaaaatgctgaaaaaaaccgttgtggatggcagttttgcctgcttcgatatgattatgaacaacattccgtgccttgtcttgacctgcgcttcaatcgtgtttaacgcgattatggtcgcggcgggcattgtgacgcgcacgccggatatgggcgtttgtgtgctttccgtgtgcagcggtattttcggttctatactgacgctgtggttcgtcggcggcattacgtgcatcacgcagagaaagcgcatccgtgcatcgaaaaaagcgatgttcttcggttggctgttgttcccgctgtttattttcacctatgcgattgcaatggtttacgcggtgtttacgaacattgaatggaagcccattcagcacaaagtggcgcttagtgtggaagacctgaacgacactaccaaaaaatagcacaaaattgcactcaaaaacagggcgtgatttgctataatctatatttgcttataaacggcacctgtgataaaatagtaagagattactttgtcacaagtgccgttttttgcggcagtacaaatcctgatttttccccagaagaaaggaatggtcacaaacatggtcacacgcgtatttgtggagaaaagaaagggattcgatgttgaagcacgccacatgatggcggatcttcgtcagaatctcggcctcaaggctattgaggacctgcgtattttgaaccgctatgatgtttccggtctttccggcgaggagttcgaggcggcagcccgcacgatcctttccgagccgaatgtggacaacgtgtacgacgaaaactacaagatcagcagcgaatatcacgtcttcgcaacggagtttttgcccggtcagtacgaccagcgtgcggattccgcttcccagtgcgtacagctcttgacgcagggcgagcgcccgcaggtcgcttatgcaaaagtgatcgccgttaagggcgacctttccgaagaggaaatggacaagattaagaactatatcgtgaacccggtcgaatcccgtttggcatcgatggaaaagccggagacgcttgacatgaagatcgatgtgccggcagacgttaagcgcgtcacgggcatgatctcctggagcgacgaggagcttagaaaatattacggcaccatgggctttgccatgacgtttgaagacctcgcgttctgccgcgattatttccgcgacgaagagcaccgtgacccgagcgtgacggagctgcgcgtgattgatacctactggagcgaccactgccgccacaccacattccttacgcgtctcaacaacatcgagatcgaaaagggcaagctgagcggcgccatcgaaaaggcactcggcgagtattttgcagcccgcgaagagctgtataagggcaaggacaagcccgtttctctcatggacatggcggtcatcggcgcgaaatacctcaaaaagcacggcatggtagacgatctggacgaaagcgacgagatcaacgcctgttccattgaagtgccggtcacgatcgacggtaagaccgagcagtggctcgtgcagttcaagaatgagacccacaaccacccgacggagattgagccgttcggcggcgcggcaacatgccttggcggcgcgatccgcgacccgctctccggcagagcgtatgtttatcaggcgatgcgcgttaccggcagcggcgacccgactgttccgtttaaggatacgatgaagggtaagctgcccacaagaaagattaccaccggcgctgcggcgggctattcctcctacggcaaccagatcggccttgcgaccggtcaggtcacggagctttatgaccccggttatgttgcaaagcgcatggagatcggcgcggtcatcggcgcatctccgaaggcgaacgtcaagcgcttcgagccgaagcccggcgatatcattgtgctgctcggcggcgcaacgggccgtgacggctgcggcggcgcaacgggttcctccaaggcacatacgctcgaatccatcgaggtttgcggcgcagaggtgcagaagggcaacccgccgaccgaacgcaaaattcagcgtctgttccgtgacccggaggtttccacgctcatcaagcgctgcaacgacttcggcgcgggcggcgtgtgcgtcgccatcggcgagcttgcaccgggccttgagattgatttgaacaaagtcccgaagaagtacgagggcctcgacggcaccgagcttgcgatttccgaatcgcaggagcgtatggcagtcgtgctcgacccgaaggatgtggagaaattccgcgccaaggcgcaggaggaaaacctcgacgcgcaggtcgtggccatcgtcaccgaagagccgagactcaagatggagtggcgcggcgaccgcgtagtcgacctgagccgtgcattcctcgatacgaacggtgtgacccagaacgcagacgcgttcatcaccgcaccggatgaaacgaaaaactaccgcaacgccgtaccggcttgccttgaaaataaatcgctggacgaggcgttcgcagagaacctctcccgcctcgaggtctgcggccagaagggcctttccgagcgtttcgatgcttccatcggcgcaggcaccgttttgatgccgtttgccggtaagtatcagctgacgccggaagacgccatggttgcgaagattccgctgctcacgggtgagaccgatgacgccaccgctatggcttacggctatattccgggtattgcacgcttctcgccgttccacggcgcagcgtacgccgttgtggagagcctctcgaagctcgcagctgtcggcgcagatccgatgaagtcccgtttgacgttccaggagtacttcgagcgcctgcacgataagccggagcgctggggcaagcctgccgcagccctgctcggcgcgcttaccgcgcagctgaacctcggtctgccgtccatcggcggcaaggacagtatgtccggctcctttgaagacctcgatgtcccgccgacgcttgtcagctttgcggtgacgatgacgaaggccagcaagacgatctccggcgcgttcaagaacgccggcaactacgccgtactgctgccgattccggaggacaaggaaaccgagctcccgaactgggaagctttgaaggcgtactacaagaacgtgcttgcaaaaatcgcggacggctctgttctttccgcacacgtcgtcaaggaaggcggcgcggctgctgccgttgcgaagatggcgttcggcaacaagctcggcttcaagttcgagaagactgccgaaaacgcagagctgctttttgccccgaaggccggcgcactcgtcgtggaagttccggcagatgcgcttgagagcgtcaagaatacattcgacgctgttgtgctcggcaccgttaccgatacggcaaagattgagctgaacggcaaagcactcgacttggacgacctcattgagacctggaacggcaagctcgaaaaaatcttcgcgaataaagcggagaccgtcgccgtagaatatgatgtgccgctcgataaccacaagtacaccggctccccggtcatccgcgtcgcaaagccgaaggtatttatcccggtattcccgggcaccaactgcgagatcgacacgaagcgtgcgtttgaaaaggcgggcgcagagaccgagatccttgttgtgcagaacctctgcgcaaaggacatcgaatacaccatcgaccgcatggaaaaggcaatccgctcctcccagatcatcatgatcccgggcggattctccggcggcgacgagccggagggctccggcaagttcatcgcgacaacgttccgcaatccgaagattgcacaggcggtcacggacttgctcgacatgcgcgacggtcttgtgctcggcatctgcaacggcttccaggcgctcatcaagctcggtcttgtcacctacggcaagatcgtggacctcaaggacgacgacccgaccttgacgtttaacacgctcggccgccacgtttcccgcatggtctacacgcgcgtgacaaacacgaagtctccgtggctctccggcgtcaacgcaggtgatgtcttcgccatcccggtctcccacggtgagggccgctttgtagcggatgacgcagcgctgaaaaagctcatcgaaaacggccagattgccacgcagtacaccacgccgtgcggcaaggtgagcggcgacatcacatggaacccgaacggctccgtgtgcggcattgagggcatcacaagcccggacggccgcgtcttcggcaagatgggccacagcgaacgcaagggcgaaaacctctactttaacgtgccgggcgaaaaggatcagcagatctttgagagcggcgtgcgttacttcaagtaataaaaggcagaaacgccttataaaattccggtatgcgcgggcaaaatgctgcccgcgcagccgcgtataaggacaatttggttatggacattttacagaaaagaacatgggcgcagatcgacctcgacgcggcggcgcacaattttaaggaaattcgccgctatgtcggcaaccggtcgatggtctgctgtgtgattaaggcggatgcctacgggcacggcgcggtgcgcatggcagaggaatacgaagccctcggcgcagactggctggcgctttccaacattgaggaagccttgcaggtgcgtcgtgcgggcatcaagctgccgctgctcgtgctgggctataccccggcggaagccgcagacgtgcttgccgaaaacgacattgcgcagtgcgcgtattctgcagaatactgcgcggcgctctccgaaaacgccgtaaaaagcggcgttaaggtgaagattcacgtcaaggttgataccggcatgagccgcctcggattctattttcaggacattgagcgcgacaaagaggccgtaagcgttgtggcagaagcgtgccgccgcccggggcttatcccggagggcatcttcacgcattttgccgtggcagatggtggcgagaatggcaaggcatttaccttgaagcagttctcgtgctttatggcgctcatcgcggagcttgaaaagcagggcgtcacgtttaaaattcaccactgcgcgaacagcggtgcaatcctcgattaccccgagatgcacctcgatatggtgcgtgcgggcgtgattttatacggcatggaaccgtcgctctgcgtggagcatcacgcggatttccgcccggtgctcagcctgcactccgtcatttcgcacgtgaaggagattgagcccggatcggacatcagttacgaccgcacattcaccgcaaaggaacgcatgcgcgtcgcgaccattccggtcggctacgcggacggctactcccgcaggctttcgaaccgcggcagtgtgctcattcacggcacgcgctgcccgattttaggtaaagtctgcatggaccagtgcatggtggatgtttccgccgtgccgcaggcgaaggtaggggataccgtaacgctcatcggtcgcgacggcgaggatgagatcaccgcggcggaaattgccggcatcatggagacaatccactacgaagtggtgtgcgacatctcaaagcgcgtcacacgcgtctacatgaaaaacggcaaagaagtcagtgttctggactgtattttggacaaatattgattgtaaagcagcggcttttggcttcgttcagccgagtcgctgctttaaatttatagtgatttgaaagggtgaaagtgatggaaaagcttttaaagctgcgcgatgaaatgaaagaggatttgctgcacggttctattttcccgttctgggagcaatataccatcgatcatgaaaacggcggcttttacggcgccgtgacggtcgataaggttattcacaaggacgcgtccaagggcctcgtgctgaatgcacgtttgctgtggacatttgcgggcgcgtaccgcattttcggcgacgagaagtataaggagctcgccgaccgcgcgtttaactacatcgttgagcgcttctgggaccacaaaaacggcggcggtttctggatgctgcacgcagacggctctgtggaagacgacacgaaaatgacctacggccagggctttttgctgtatgcgttctccgagtacgtccgcgcaacgggcagcgaggaagcacgcagatatgccgatatgacgtatgattacatcgaaaacgtgtgcaaagagggcaactattaccttgaaaacgcacgcggcacgggcagcagcaacggcgccattacggaggcgggcaacctttccatgaacacgcacatccacattctggagccgatgacgtgctacttccgtattcgccacgatgcctgcgtggaggagagccttgtgaacctcatcgagatcaccgcacgcagaatttacgacaccgagcaccaccattttgtcatgttcttcaacgataaaatggagccgctgccgggcgaggtttcgttcggccatgacattgagggttcctggctgttgacggaagctgccgaagtgctcgaaaagtacggcgcagataaagcccgtgcggaaaagctccttgaggaagcgaaggaggtcgccatcaacatggtgaacttcacgctgagccacggcatggatacggacggaggtctgtttgacgagggtcacgaagaaggcggcatcgctgtgccgaataaggtctggtgggtgcaggcggaagccgttgtcggcagcgtgaacgcatggcagattacgggcgacgagaagtatctcgattccgcgctgaagagctgggcatacatcaaagccgaaatcatcaacggcccggcgggcgagtggtttgcaagcggtaaaaattccccggacgaggaaaattcgcacctgctgtgcggcccgtggaagtgcccgtaccacaacgccagagccgcgtttgaaatttacgagcgctgcgaggcactggaaaagtaaacagcaacagcaaagccctgccgagaaaattcccggtagggcttttgtcatgcttaaattaaatttaatcgaacccgtagttttccacacccgaaagctcggagtgcgttttggcatagctctgcgcggcggtataaaaatcctcccaagttttctccggcgcaccgggggaaagcggatgcaggcgcaaattgctgtcctcacgcacggcggcataagcgtaatcgctgtaaatcaaaatgcccgtcacattgtcgagcaggtcgtagcttcgcggcaactcgtaaatggtctccgtatccgtcgtttcgagcacctcaaggtcaaatacgtgcctatactgcccggtgacgtacaggtcacagaggtcggtaaaaccgttttcaagaaaaacaggggaatcgccgtcaaaatagagccgcagcacggaaacgtcgccctctgtgccgccgaattcaagtgcaggcacatcgaccttgtgcgccgcacagccggaaagcaagagcagcaaaccgagcagaatcaaaacggacaataaacgctttttcatgtgcataccccctttcggaaaacaggcggtgtgagggcttccttattcattcagtaattcgtcaacctcgacgggttccagctctttcaatgccgggtggtcggtcagcgttttcagcatgcgccaaccgaaatgatcttcttccaaattctccggaacgggacggaagccgaaatcaaggtacagctttgcggcgacccacgtggtggtctgggtgggcacgaacagctctttgtagccgagcgcctgcaaacggtgcagcgtgtgcgcgatgagcgggcgggaaagtcccttgccttgcgcgtcgcggcttacggaaacccaatgcagccagccaccgggcagcttttcatcgaaaaacgccgttgcggtcgcaaccttcttgccgttcgggtcgacgatgaagaacattctgtcgggcagaacgtcttcgtgcttgccgtagtagcgctgccacgcgtccacgccttcctcaaaagtcgaaaattctttcgccgatttttcaatctcaatccacgtatcgcggtcgccgggggtgtaggttgtgaacgaataccccgcgggcagatcgtaatgcggaatttccgttttcgccggcatggtcatgaacagatggtagtacttcaaacggctgtcgtgattatctaaatgtaaagaagctacgtctttcatagatttgatcatgaattaggattcatttctgccgcagcatttcttgtatttcttgccgctgccgcacgggcacgggtcgtttctgccgggctttttgccgtttttgcgcaccggctgcttgacggccggcgtatcggaggatgttgtgccggtctccttggcgacggcttcacgcttcggtgcttccggcgtcttcaggcgcacagtcagaatcatgcgggcggtattctcgcggatcgtgtcgatcatcgcgtcaaacatgtcaaagccctcttcgcggtatgcaatgaccgggtcttgctggccgtaggcgcgcaggcggatgcccttctggagctcatccatcgcatcaatgtgatccatccactgcgtatcgacgttcttcagcagcaccacgcgctccacttcacgcatgatcggcggggtgaacgccttctcacgcaggtcgtaaagcttgtgcgcacgctccttgagaaaatcgatgaccgtttgctgctcgagatcctcaaacgcctgaccctcatagtgcagctcatccggattgaccatccagccgaggtagtggtcgcgcagaccgcggagatcccagtcgtcgtgcagggtgttctccggcaagaagcgcttgacgttcgcttcgatggcctgatcgatcatggacataatctgcggcttcacgttgtcgccgttcagcacacggtcacgctgctcatagatgatctcgcgctggcggttcatcacgtcgtcatactgcagaacgttcttacgaatggcaaagtttctgccctcgactttcttctgtgcgttttcgatggtgttggagaggatagacgcttcgatcggcatgtcctcgtccacattcaggcggtccataatggtctggatgcggtcgccgccgaacagacgcatgaggtcgtcttcaagagagatgtagaagcggctcttaccgggatcgccctgacggcccgcacggccgcgcagctggttatcgatacggcgagattcgtggcgctccgtgccgatgatgtacaggccgccgagcttgcgaacttcctctgcctccggcgcaatctccgctttgtattttttgttgagctccgcaaaggtcttgcgggcattcaaaatctcttcatcgtccgtgtagccgtaggcggaagcctcaccgataagctcctcggagaactgcatgcggcgcatttcggcacgcgccataaactctgcgttaccgccgagcagaatatctgtaccacggccggccatgttcgttgcgatggtcacggcgcccttacggcctgcctgtgcgacgatttcggcttctttttcatggtactttgcgttcagcacttcgtgcttgatgccgcggcgcttcagcatggcgctgagctgctcggatttttcaatcgtgatggtaccgaccagcaccggctggcctttttcgtggtgctcaatgatgtcgttgataacggcattgaacttgcccttttcggttttgtaaacaacgtccgggcagtcttcacgaatcatcggcttgtttgtcggaatctctacaacgtccagtttgtaaatttcgctgaactcggattcctcggtcatggccgtgccggtcatgccggagagcttgttgtaaaggcggaagaaattctggaacgtgatggttgcaagcgttttgctttcgcgcgcgattttcacgccttccttcgcttcaatggcctggtgcagaccttcgttgtagcgtctgccgtacatcagacggccggtgaattcatcaacgatgatgacttcgccgtcgcgcacgacgtaatcgatatcgcgctgcatgatgccgttcgccttgatcgcctgattgatgtggtgctgaatggtgatgttgtccgggtccgtgaggttttccaagctgaagaactgctcggctttttttacgccgcgcttggtgagcgttgcggtcttctgcttttcgttgatgatataatcgtaatcctcgtagatctcgtcattgtcttccttttcgttcgtctccgccacgcggatggggcgcagggtctttgcgaagcggtcggcgacgttgtaaagctccgtggactgctcgccctgaccggaaatgatgagcggggtacgcgcctcatcgatgaggatggagtccacctcgtccacgatggcgaagttatggccgcgctgcaccttgcgttctttgtacgtgaccatgttgtcacgcaggtagtcaaagccgatctcattgttcgttgcgtatgtgatgtcgcaggcgtaggcttttttcttttcgtccggctccatgccggggatggcaaggcctacggtgaggccgaggtagttgaacacacgcgccatcatttcgccctgatattttgcaaggtaatcgttgacggtgacgatgtgcacacccttgccgcttaaagcgttgaggtacgccgggagggcagcggtgaacgtcttgccttcgccggtcttcatctcggcgatgcgaccttgatgcaaaatgatgccgccgataatctgtaccgggaacggcttgatggagagcacacgccacatggcttcacggcacgttgcaaacgcttcgggcaggatgtcgtcaagggaagagccaagggagaggcgctctttcaacacggcggtctggcccttcaactcctcatctgtcatttttgtgtatttgtcatcgagcgcgagcaccgcttgcttaagcggttcaatgcgctttaattctttcttgctgtagctgccgaacagctttgtgagtaggttcatggttcgggaacactttcctttctttcgcgcggattccccgcgcgcggcatataaatcagtatagcatggaacagcataaaaaagcaagcgataggggcatattcatgaaaactttataggtgatcaaaaagaagcgcattttaaaacgcaaaaacggcagtgcaattcgagaaaaacagcaaaatacaggatagccttagccgaaatgcacaaaaaactctttttttccaaatcataaacagcttatgaacaaaatgtgactttttattcggttttctcttgattttcgcaaaattagaggctatactataggtaacaattcctgtttttccgatgtgtgcaaaccataactggtcaaaaaaacgaagaacaggaaattctttaatttataggagagtgaacatccttggacaaattcttcaaaatttccgagcgtggctcgaacgtccgcacagagatcattgccggtctcacgacgttcttcgcgatggcttacatcgtagtcacgaacccgaaccagattgttagcttcaaccatctggctccggatgccgacccggccttccagcagatttggaacgctgtgtatgtcgcatccattctggcagcaatcatcggtacgctgctgatggctctgtatgcgaagatgccgtttgcacaggcttgcggcatgggtctgaactccttcttcttcgtatccttcattctgccggaaatcatctccggcggcgacgtcatcaagggctaccatgcaggcctcgtcatcattctggtttccggtattgtcttcctgctgttctctgtcacgggtctccgtgtcaaggttgcaaaggctcttccggactgcctcaagaaagcaatcccggccggtatcggtctgttcatcgctttcctcggcttccagaatgtcggcatcatccagactaaccagtacacgctcgttcagttcgttgatatccacggcgcactgaaggcaggcgcattctttgcggatgttgaaggtgtaaaggcatttatgccggctatcctcgcattcctcggtctgctcgtcattgcaattcttgaaaagcacaacgtcaagggcggcgtgctcatcagcatcgcaggcatttccgttctgtactatcttctttccggcacgaccccgaccttcgacatgagccagatcggccagacctttaaggatttcggctccatcggcatcaccggtgtgttccaggctgacgcttggaagcgtgcgttcacaggctctgagctcggcggcatcttctccgcaatcatgctcatcgttacgttctgcctcgtcgatatgttcgacaccatcggcaccctgtacggcaccgcttctcaggcaaacatgctggataagaacggcgatccgatcaacgttaaccagtgcatgaccagcgactccgttgcaacggttgcgggcgctgtttgcggtacttccacctgcaccacgttcgttgagtccgctgctggcgttggcgccggcggcagaaccggccttacgagccttgttgttgcaatttgcttcgcggtttgcctgttcctcagcccggtcgcttctcttgttccgacctgcgctacggctccggcactcatttatgtcggcgttctgatgttgaagggcttcgcaaaggttgacatgtccgacctgcgcagcgctgttccggcgttcctcgctctcatcatgatgccgctgacctactctatctccaacggtatcggtatcggcgcgatcgcttatgtgctcatcacgctcttcaccggtaagtacaagaagaacgacatcggcatcaccattatcgctgcgctcttcgtcattaagtttgtctttgttacgatgtaattcgtacataaaacgaactttagcttgagataacataagaggcgctcgcttgtgactttttcacagtgggcgccttttttcgttttattgcgcgtttttgtcctgctatactttggacatatcggacgagtaaaaggagcaggcgatgaaacaggcggatagtttgcttttaaacgcgttgaaagcagcgatacataacgaaaaagcggcgctcggtgtgctgccgcaggaaacacagacggagcttttgcgccaggcggtgcgccacggcgtgctgccgcttgttcttgatgcgtgcggcaatgcactgaaaactgcgcggcgaatggcgttttgccaaacggcagagcagattttgaaaacgcaggtatttttacagctttacagcaagctgcgcgaaatgaaattgcatccgctcgtgctgaaaggcccggtgtgcgctgcgctgtacccgaagccggagctgcggctgttctcggatgtcgatttactggcggtttcgggtgaatttgaccgcacacgcaatgctttattgcggctcggctgccgcacagcaggggagagtgtcgatccgcttgaacagacattttacctgcccggcagtccgctcgttttagaactgcacggcgcggcgttcccggaaaacgatgcgtacgggcacatgaaagccttttttgcgcatgaaaagctgcgcacggaaactgttttcgtgcagggcgaagaaatttatacgtttggcgcgaacgagacgtttttgtaccttttgtgccacagcttaaagcactttctgcacggcgggtgcggcattcgcgcggtgtgtgatttgctgttgtttgccgaaaagcatgaaaaggagcttgataaactgtatttgcgccgctgctgcgaaaagctttcggcactcgaatttttgacggcgctctttgaaatcggcgagaaatatctcggctttgagaaaacggaaagcttagcgttgcttcgcgtgcaccccgcgccggatgagactgcgcttttagaggatattttggcaggcggcgtgcacggtgcggcagaaaaaagccgcttgcacggtgcgaacatgacgctgcacgcggcggctgtgcagaatgcaggaaaacgcgagcgcttttccgtactgcgtgcggcgttcccctctgcaaaagcgctgcattgcgcgccgcatagcttgcctgccgcatggggaaggcggcttatacgctacggtaaggaaagcattcaaaactgtacgagccttagaaaaagtgtcgagatcggcaagcggcgcgtggcgcttctcaaaacatatcgcctcataaaataagccggcggctgcgcccaactcgggtacagccgccggtgctttatttttgattaacggatgcggaacgtcttgatctcatacggcttgatggtgaatttgaatgtaccgccttcgaccgggacatccgtgagcgcattctcctgcaagtcacactccgtaacggaagcgatggggcggttccaatgcagttttgtcgttgtgcgggcgttttcacattcgtacagacgcacgatcacgccgtcgccgtcttccgcctgcttgacggtttccaaaatgacgttttttgcgtccgcactcgcgagagagtacgcttcgcctgctgtgccgcctgcggtggcgcgcacaggctgattcaggaagtacgcctgcgctacggtctccgcgctgcgccatgtttcggcgtgcgggtagagcgcgtaggtgaatacgtgcatctcctgatcggcgacagggttcggctctgtgccggatttgatgagcgtcagcgccatttcgccgttgtgcacggagtgaccgtatttgcagtcgtttaacaggctgatgccgtagtgaccctcggaaacatcgatccacttttggccgcagctctcaaagcgtgcctgatcccagctcgtgttctgatgtgttttgcgcgtcacattgccgaactgaatctcaaatgttgcttcgtccgtgtgtacgtccatcgggaagtgggctttcaggaggtgctggtgctctttccagtcgaccgtcgtctcaaagtcgatgcgcgggcacgcggcgtagaagtgaattttctggcagatgaccgaacggctgaccttgcgctcaatctcgagagttgcgcgcacggggccgcgttccgtccattccatgtgctgcacgtcggtgacgtcccagaatttctccgtatagtagcagtcgatgtcccagttgtcgtagtgcatcggcttgtcctcgtacatgcgcatcaggttcgcatatttgccgggctgtacggtctcgcggtcgtttttgcggtcataaaggcgcgtgatgagcccgttttcatcaaattcaaccgtgtagaacggcgtcgtgatcgtgctgccggcaatgtgcagcgggttttcaaagctgcttgcttcgaccggcgcaaagcacttgtagcccttcggcggcaagtcgggcaggaacgccacagcaccgttttcggtctgctgcacgggataagtatttttgccgtcggaaagtgcatttgcggtgcaattttcaagtacaacgatatcattgcgcgttttacccgtcgtattgaacaccgtgatgccttctccctgcggcgcaagcacttgcatgcggtcggcagaaagcgcagagatcgtctccgccatcgcgtcgtattcctttttcgtctgctcgtagacctcatgaatggcggtgccgggcagaatatcatggaattgattcaaaagcgtgtttttccacaggctgtcgagcgcttccgcggggtaggggagctgcggtgctgccagtacgctcaaaagctccaagtccatgagtcccagctctgttttgcggttgccgcgcttgttgcgcgccatggaggtgtacgtgccgcggtgatactcgaagtagagctcaccctcccacgtgggcagacgtttgctgtcttttacgcgctcgttcagctcgtcaaaatactgccgcgcgaagacctgtcgcacctttgggatgcccaaaacgcctttttccatgcgcttgctcgtctccagcatatcgcgggtcgggccgccgccgccgtcaccgtagccgtaagcgatgagaatatcgttgttgatgtctttgttttggtagcgctcccagccgcccataatggcatccgggtgcagcatgccgttgtaggtggtgaagaagttctgcacgttctggccgatgctgagcgtagtgatgaaatgcgtcagcacttcgctgccgtcaatgccgcgccactcgaatgtatcgaacggcacttcgttgaactggttccacgaaagcttcgtcgtcataaagtaatcgatgccgctctttttcatgatctgcggcagcgcgccggagtagccgaacacgtccggcagccacaaaatgcggttatccacgccgaattcctcgcggaagaagcgcttgccgtgaatgaactggcgcacaaggctttcgccgctcgtcaggttgcagtcggcttccagccacatgccgccctccggctcccaacgcttttccttcacgcgctctttcaggcgcgcatacagctccgggtaacgctcttttaagaaataataaagctgcggctgactggacatgaagtgataattcgggtattcgtccataagcttcaaaaccgtcgcaaagctgcgcgcggtcttttcacgcgtctgggcgaccgtccacagccatgccacgtcgatgtgcgtgtggccgatgcagctcgcaatcacgtcgttgtgtcccgcaaggtcggtgtagaccgctttttttagatatgcggaagccgcgcgcacggaagcgtaaaaatcctcgctgtatggcgtgcgcaggtcgagcaggtttatgccttcgttcagcgcgttttccagcagcatgcggtttcggtcttccttttccatgcgcgaaaacgcctcgaccggcactttcaagtcataatacagcgcttcaatctccgggtcaatctcctgaatttctataaagagattgaattcgttgtggatggtgccggtgtacgcttgcaagtcgaacacaagcttttcgccggaaatcgctttcgggaaaagcagcacgtcacggtgattcatgtccatgccctgcacgggcacgttgttcacaaacagcaaaaactgcgggtttttgccgtcgtccccttcgatctgcgtgcgcacattcagccacattgccttgccgttaatcgctttcggcacggtgaattccgtgcggaaccaatagtgctcgtccgggccgtaccagtgcatggtgcggctgtcaaacgacgtccacggcggcgtagcggcatctgctgcttcggggcggatatacgtgccctttttgcagataaggtcggtcagcggaatgcgctgcacgatgcgtagacggtaaagctcatcacaaatgcgctccacacgtttagcgagatacctcatagttgcaactccttttctatagcggtttggggtctcgtaaagattggtgcttttgacttgattttagcataataaggcacagagaacaagataaaatgtacaaattctttcggcttttcacacattggaattgtctttacgcacacgtcgcgtcgaaaatgcagaaaaacaagttatttatgcacagaacacaaaaaataattgaaaatcagcggaaagtacgctatactaaatctataaagcagagcgtattttgagaaaagcaacggtggctcagccccgaaaaacagcggttttggagtgccgtattcaaatcacatcacatagaaaacagaggaaaaaatatgcgaaaaaaggcttggatccttttgctttttgccacgcttatggcgctgctttgcgcatgcagcgatacggcacagcaaccggagacggaaaaaccgaaaatacgtatcggcggcacaacgtatgcgccgtatttttaccgcaatatcggcggccactataccggcatcgacgtggagattgccgaggaagcctgtgcgcgtatcgggtatgagccgatcttcgtggagctcgatatcgacaagggctttgagcttttgaatgaagactatgtggattgcctttggtgttgcctgacgatggaaggcaacgaagataagtttatttgggcagggccgtatatgtacacgcagcgcgtggtcgtggtgccggcggacagcgagattgaaacacttgaagaccttgccggaaagtgcgtggcggtgcaggccggctctataagcgaggagatcattttaaaagggctgaacccgaatttgccggagattacggacctttccacattcagcacgatgggcgaggtgtttacttcgctgcgcaagggctatgcggatgcggccatcgggcatgaaagctcgctgagattatatacggacgaatacccggacggctaccgctacctcaacatgaacatgtacagcgacgccgtgggcgtggcatttaaaccggacggcgatgcagtactggcggaaaagctgacgcagacgctgcttgaaatgcgcgaagacggcacaatggccgctattgtgaaaaaatatgggttagatgccgaaaaaagcgtgaacggaggtaccgaatgatgccgaagttcaagggaaaaacaaaaccgaagctccataagccgagcatggaaacggtcatgcggtggattgtcacgcttcttctcggctttgttgtgctgctgccggtatttgcaggcgtaacacagtatgaacagaacaaggcgaaagcggatgttgaggacgtactcgcttttatgcagacgaactgccgcaagtacgacaactaccgcttggccaataccaccgaagcgctgcaggatgttttgaccaaagtcaaaacactgacggcataccgttacgaagaagatgcgcttttaaacgaaaatcgcttacagcgctatgcgaaatttcagtatttgaccggcatttttgttttggatgaaaatttctccgtgctggcccattacgacaaagcgggcaaggatgaaagtctgctgctcagccagataataggggacaaaaatgcggcggatattttgcactatccgcagaaaacctatgccgaccagatctgtttaaacgacaatacgtataactacgccatttccgcacggcaggataaaccgggcctcgttatttgctatacggatatcacgcgctttcaaaacgataaaaatgagctttctctctccaatatgctggatgctgaaatgttccggcaggatgtgaccgtcgtcatcacggacggcatgcgcgttatcagcacgaattgcgagcagctggagaacacgcttgtgcagtattatcctattgctgacgtgctcgttggaggggagcaacttataccggacacattgctgcaattaaaaaacgacaacggcacatggtacggtatgttcacccagtacagagattattatttgtatgcctttttcccgagtcgcgtagtctacgcaagtcgccgcggttggatgctgctgtttacggcaatctatctgttttgcggcatggggtaccttatttggcggcagtacagtaaaaagcgccgtctgctgcgtatggaaaaagaataccaccttgtcagcgccatttcgagcatttacctgtcaaacctgctcattcacccgcaggatgatacatgggagcccattgtgcagagtgagcgcatgaaagcaatcacaaacggtgttttaagcgcaaaagccatgctggaaaagtttaacaccgagtgcgtagccgaggcgtaccgggaggaattccgtgcgtttacggacctcgataccgctcagcagcgcttagagggcaaggcttttgacggcttcacaatggaaaatgtggagggcaagtggtaccagctgcttcttgtgccgcagcgccgctttacgcaccgggaaaagccgagctcactcatgcttttgttccgcgatgtttcgaagcaaaaggagcgcgatatggaatatcaggaaaacctgcgccgcgcagcagaggaagctacccttgcaaacgccgccaaaacggattttctgcgccgcatgagccatgacatccgcacgccgatcaacggcatccgcggcatggtacagattgccgaccgtttcccgaatgacgcgaaaaagcaggcggaatgccgcgaaaaaattatgcggtcttcagattttcttttagagcttgtaaacgatgtgctcgatatgagcaagctggaatccggcgaaatgcagcttgaggaagtgccgttcaatttgaacgagctgctgcacgatgtgggcacgctgctctccacgcaagcgcaggcgcgcggtattacgtataccatcacaatggaagataagcgcgaaaagcatgtcatcggcagcccgctgcatttaagacagatctttcaaaacatcggcggcaacgccatcaagtatggcagagccggcggctatgtacatgctacgtgcagcatcgtttcacaaacagagaacaccgttcgctaccgctttatctgtgaagataacggctgcggcatgagcgaagaataccaaaagcatatgtttgagccgttctcgcaggaaaattccggtgcacgcactacgtatcagggtacggggctcggcctttccatcgtgaaaaaactcgtggatgccatgggcggcaccgtcaccgtggtcagcgaaaagggcgtgggcaccacattcatcacggagattccgctgaagctcgaccctgcgccatttgatgctgaaaagccggaggaagagatcgataccaccgtgttccgcgggctgcatgtgctgcttgtggaggataacgaagtgaacatggagattgcggcgttcctgcttgaggacagtggcgccgaggtcacaaaagcatggaacggcgcagagggcctggagaaattcaacgcctcggccccgggtacgtatgatctcatcttaatggacatcatgatgcccgtgatgaacggtttggaggcggcggagaaaatccgcgcgctcgaccgcccggattcggagaccgtgccgatcttcgccatgacggcaaacgcgttttccgacgacgccgcccgcagccgcaaagccggtatgaacgagcacctcacaaagccgctcgaccttgaaaagatcacaaaagcggtgcgcaaatattgcaagaaaaatagccgataaaagccataaaacggcggcgtgcctttaaaagcggttgcgccgccgtctttttatgggctgcagtgtgcctgttcctaccaaaacaccaatgtgcggaaattccataaattgattctgaaaataggatgaattcctgtgggaattttctccacgtgaaggttgaaatcatagtgttgatatgataaaatattagcgcgaattttgcaattctggtgctttatgcagaaaatgagaattttggacgcggctttcgcattttaagcctataaaactgctcgattatgcgaaaagcagcataaatatacgaaatacgaagctcggtttagaaagggaggacgttccatggcttatatgcgacttggcgatttgctgattgcggcaggtgccattacgcaggagcagcttgaagaagcgctgaccattcaaaagcagaagaaagaacgtctcggcgacgttctgattgaaagtaatatcatcacggaacggcagctcattgaagcactgcaaatgcagctcggcgtcgatttcatcgatttaacggcgatctctattccattagagctcgccaaatttgtgccgcgcgccatcgcgaaaaaatacaatgtggtgccggtaaagcttgtaaaagacgagctctttgttgccatgagcgatccgttgaacttcgttgcgcaggaagagattaaggccgcttcgcataagcgcgttgtgccgatgatctccacgcgccgcgcgaccgagcaggccatcggcacattgtacggcagcgaaggcacggcccgcgccattgaagaaatgaagcgagaggtcggcacatccacaccggatatcgtgccggtgcagatgaaccagacggatgccggcaacgcgtctgccgcgccgacgatccgctttgtaaactccgtcattgagcgcgcctttttggagcgcgcgagcgacatccaccttgagccgcaggagggcgaaatggtggtgcgcatgcgtatcgacggcattttgagaaagattttgaccgtgcccgcgaatttgcagagcaacgttatttcccgcctgaaaatcatgggtggcatgaatatttccgagcgtaagatcccgcaggacggccgtgccatggtgcaggtgcgtcaccacgagatcgagctgcgtatctcgtccatgccgacgatctacggcgaaaagattgttttgcgtttgctcgataaatccgggcatacgatcacgaagcagtccatcggccttgagggcacagacctgcaaaagtatgacgcgctgctcaaaaacagcagcggcgtgattttgattgtgggcccgaccggttccggtaaatccacgacgatgtgcgccatgctgcaggagcttgcaaatgaggaaacgaacctcatgacgctggaagacccggtggaatacaacattccgggcgttaaccagtgccagatcaacgaaaagaccggcatgacgtttgcggcaggactgcgcgccatcttgcgtcaggacccggatgtcatttccgtcggtgagattcgcgacggagagacgggcgccatcgccattcgtgctgctattacgggccatttggtgctttctactttgcatacgaacgacgccgtttccgccatcgaccgcctggtcgatatcggcgtggagccgtacctcatttccagcgcgctgcgtggcgtcatttcccagcgccttgtgcgcaaggtctgtccgcactgcaagaaggcgtataggccggaggcggaggagcttgccatgctcggcctgccggaggacgccaacgtgcagttctaccgcggcgagggctgtcaggagtgctaccacaccggctacaagggtcgccgtgccgtctttgaaatcttcatgctcaacgggcgcattcgccgcatggttacagaaggcgcaaagtacgatgcgcttttaagggcagcagcggagactaactttgtcacgatgcgcgaaaattgccgtaaccttgttttgcgcggcgagatcagcgcagcggaagccgcgcgcgccatcaattccacagcggattgacattctgctgaaaatccgttgaaaacttgctcataactttcggaaaggacgcagtcgccgcgtttcggcgatggttttaatatgcttgaaatcagcgaaatcatcgcgcaggcgcagcaaaaaggcgcttccgatattcatattgtcaccggcctgccggtgaaatgccgcatagacggcaaggtgcagaacctcacggagaaagtcctcacgtgggaagactgcgaatactacgcaaaatgccttgcgggcgaccttttccacgagatcgaatgcatcggcgagcttgatttggcgcggacgtttccgtgcggagcgcgaaccagaatcaatctgttccgccagcagggggcggtttcggcggcgatccgtattttggcggataccatcccggagatcgaggcgttgaatttgccgccggtcgtttccgaattcccggagtaccgcagcggcatcattttagtcacgggtgaaacgggttccggcaaatccacgacgttggcggcgattttaaatcgcatcaaccatacgcggcgcagccacatcatcacgctggaagacccgattgagtacatttacgagccggatcagtgcatcattaaccagcgcgagatcggcaaagacaccagaagctacgcagacggcctgcggtctatcctgcgtgaggacccggacgttatcctcatcggcgagatgcgcgacctcaataccattgagaccgcattgacggcggcggaaacgggccacttggtcttcgccaccctgcacacaaactccgcagcggattccgttgaccgcatggtgaacgtgttcccggaggggcagcagcgtcagattcgattgcagctttccactacgttgcgtgcggtgctttcgcagcagctgttgccgaagcgcgcaggcggccgggcggcggcgtgcgaagtcatgatggtgaacagcgccatcaaaaatttaatccgcgagggcaagaccccgcagattgacagcttcattaccatgaacgcgcaggacggcagcattacgatggataatgccctgctgaaaatggtgcgcgagggcaccgtaacgtatgaaacggcgctcggctacgccagagaccgagaagcgttttccaagggaagacgcggctaaatttaggaagaaagcgagggagcgggcttgacgacctataaatacaaagggctttccccggacggcgcaaagctttccggcgtcatcaaagcgtataacgagtttgaagcggtcgcgcagctgcgcgagacctgctccgtcatcaccaaaatagaagaagtcaaagagacgcagagctggaacaaacagatcggcacgaagaaaatcaaagacaaggagcttgccatcatttgctcgcagttcgccatcattttgacttccggtctgcccattgtgcgctgcgtggagatggttgcggcacaggcgcgcaccaaagaactgcaaaaaatgctgaaaaaggtcgcggaggacgtctccggcggttacagccttgcgcaaagctttgaaaacaacgctacgggctttccgaccacgtttattgagaccgtacgcgcgggcgaacagtccggcacactggaagaatgctttaaaaaactacataagtattacgataaaaccgctaaaatgaaagcgaagatcatcagcacgctcacgtatccggcaattgtcatttgcgtcgccgtcatcgtgttcatcatcattatggtggtagccgtgccggcgtttacaagcgtgtttctggagctcggtaccgagctgccgggcatcacaaaggggctcatcgcaacgtcggattttctcacgaactactggtggtcgcttattttgattgtgctcgcgttcttcatcggcaggcttctgctgaaaaagaacgaaaaggggcgtgcgttccttgcggaaaacaagctaaagcgctcaccgctcaaaaaaatgcacagtctgaacgccgcttcgcagtttgcaagcaccatgagcaccatgctcacggcgggcttgccgattacgaaagcgctggaggtcacggcaaatgtggcagataactacatgttcgcggtgtccatccgcaaagtgcggcagggcgtggagcagggccgcagcctggtggactgcatgaacgagattccgtattttccaaagctgctcaccgaaatggtgggcgtgggcgaacgctccggcaacatggaagaaacgctcaccgtcatcggtgattacttcgataacgaggtctcggtgttcacgcagcggttgctctctatgttagagccggccatcaccattgttttggcggtcgtcaccgtcattttgctgctggccgtttacctgccgatgttcaccatgtatggcagcatcgtttgatttatttcgctgtaccccgtcggcgatccaacccgaaccggcggaatacataaatttcgatggtgaacccccaaaagcacatctttggggcgagcaaaatttcaatgaattggagaatggttcttatgatgaacaaaatgcgtaagatgaagaataagaagggcttcacgctcatggaaatgctgattgttgttgcaatcatcgcaatcctcattgctattgctatcccgacctttgcttcttctctgaataaggcaagagttgcaaccgacgaagctaacatccgttccggctatgctgctgttatgactgagattttgaccgatgaagctcataatgttgagggtagtacaactggtactactcctgctaccttcacgctgaagaaagatggtactgtttccacgacggctggcgatgatgcatataccacacagggtaaaccgtctgataatgttgaaattgcaggcaagtctgtaaataagtgggaaaagggtcagaatgttacttacacatatcactatgataccaacacgattgatatcactgttggcaccgcaactaataacggttaatctcgcctaatcagcacttttcaactcttaaatgaaccagatctattgaggggccgggggttgcggctcccctatgatctgttcttttgatttttcactttaggttttcataaaaaaggggacgtagtatgctttgggtttcacccgctctcacggtttatatttgtgtgcttacggggattctcggcgcgtgcatgggaagctttctcaactgcatggcgtggcgtatcgtccacggcgaatctgttttacacgggcgctcgcactgcgacgtctgcggccacgtgctcggcgcgggagatttaattcccgttttaagctacatcatgcacaaaggccgctgcaaatactgcggcgcaaagctctctgcgggacatgtctttgcggaagtgttaacggcgcttacgtttttgctgctcgtgctaaaatatgatatttcgctccaagcccttgaatacattttgctggcgtgcctgctgctcgccgctgcattcacggatttggaggggtatatgatcccggaccgtttcatcgtgacggggatcgtcgtgcgtgttgttttcctgtttttgcaggggaatgtgctcgaaaacctcatggatgcgctgctcggcggcttcgccgttggcggcggtttactgctcatcgtgctcttatacgaaaaagtgcgccaaaaggaagccatgggcggcggcgatattaaactgctgttcctcaccggcctgtttctcggctggcagcggaacattctgtgcctgctcatcgcgtgcgtgctcggcatcgtcttcgcgtttgtcttcccggaaaaacgtaccacagaagacggggcagaggaagaagacggaaagctttttccgtgggggccgtccatctcggcggcggcgattctcacgctcctttgcggcagcgagatcatcggcgtgtatttgagtttattttaacggaaagaacaaaagctttacagcttgacggatagggataaagaagaaagcgaggtgtctgtaccatgcccggacaaatcacggcattcgacattggtgagtgcatggtaaaagccgtatgctttacaggcggcaaactgaaaaaggttatggcgaaagaattgccggataatatggtctccggcggcgaaatcgtctccatggacgccatggcggattttataaaggaaatggcgaaagaaaacggcatctcccgcggtgcggcggcggtcattctgcccggcacgctggtgttcacccgcaacgtgaccgtgcccgccatgacggacggccaactgttgtataacctgccgtttgaatttaaagattacctgacgcaggaaaagaataagtattatttcgactacgccgtgcaggatacggtgaaagacgaagagggcaatgtgaaagaattgcagcttttcgtttgcgccaccttaaaaagcaccgtggaagaataccgcgccatgctgcgccgtgcgggcttcaatttgaaagtcgccatgccggaggaatgcgcctacgctgcgctgacggaggattacatgcagcgcacaaatgcgcccgcgggcagcgattactgctttgtagacctcggccacaacggcatccgtatgcacattttgcaggacggcaatttcaccacgaagcgctccggcgacctcggcctgcgcgaccttgagcagacgatttccgatgtgcgcggcgtggatattcacatggcacacgcacacattttgtccgattacaacgacgtgctttccgaagacgtgagcgccgagctgttcaaccgcatggcaatcgaaatcatgaaggccgtcaacttctataattacaataaccgcgagcgctcgctccggagaatttatctttgcggcggcggtgtggcggtagatcagatacgcgcggccatctgccgtgtgacggatctggacgtacataacgccgaggagctgcttcctcagcacgacgcattggaagcggcgtggctttacatcaaagcgatcggctgcgcgctgcaaaagtaaggaggcgttggaatgaagcttgaactcggcatggggaacggtgccaaaaagcctgtaaaataccccaccaaaagaaccgtcaacctcgcaaagcgcgagtcgcactcccaaagcgtcatgacgctttccatcggcacggcggtcattatcgtgcttgtggtgctcgtcgtgaaattcggcgtacttgaccagcttgcgcgccaaagtgccgcagaaagtgcctacaacaccgtgcatgcccagtataccgaaatgcagagcgccgtagagaaataccccgaggtcgaagaggagtaccgcgcctattccagaaaatggatgcagcaggaggattccggcgcgttcgtttctgtggacagacaggaagtgctcgacctcatggagaactgtctgcagtcctacggcacgataaaggccgtcaccatttcggacgacgtgatgattgtttccatgtccggcatgaatctgcaggagatttccgctatgtttgagattttacagcagcagcccattgtaaaggctgctgaccttacaatcgcttccaccgaaaaaacggcaggcgaagacctcgatttctccgtgacgatcacattacagccggctgacacggcggaaggggaggccacagcatgaaaagagcctttacaacgcgcgaaaaagtgatgctgctcgtcctcaccgtgctgctcatcgtcatcgcatattttaagctcatcttggagcccatcaacaattccatcgacgagtatcagtccgaaacggccgcggagcaggacgagattttgcagaacaccgcgcttttgacgcgcatgaaccagatgcagaaggagctcgaggaaatctatgccgcgggcgaccccacgcccatcccgaattatgacaattccggcaagctgctcgttgagttgaacagcattctttcggcttccgtcgattattcgctggatttcggtcaggtctcggcactgaacgatggctacatcatgtgccgccccatcaacatgacctttacaacgaacacctacgccgaaacgcgcgccatcattgatgcgctgcacaacagcgattttacaaaccaaatatcggacatcagcgtgcagtttgaaaattccggcagctccggcaatgtgcaggtaaacctgtatattacgtattttgaacttcaaaaatagctggtgcaacacaggccggaagctgttttttgcttgccggttttctgtgtttaaaaagacttataccgttttacagtttccatatttttctcaggagcaaaacgcatgaatttttcacgggatatgaagagtttgaaaaatagaagaaaggggaaagccggctttaccatgtccgagcttttgatcgtcgtggccatcgtcgtcgtgctgcttgccgtggcggttctctcacttgtgacgattcaaaagaatctgcgccaaaaggagctcgacagtaaagcggaaatcctttacgttgccgcgcagaatcgcatgtccgagctgcgcgccggcggctacgaaagcctttatcagtacgatgaaaacaaggataacggcgttgcaaaggttggtctcattccgctggatgctcccgaagaagatgcggaagacgccatcacaaaagacacgctctgctacgtcgtttccgcaaaccgcgtggaagtcggcaaggcggcagcttccgttctgccggaatcttccgtagatgccgagctttggaacaaccactgggttatcgagtacgaccccgaaagcggcagtgtgtacagcgcattttacagcgaagaggagatcacaagcggtgatgtctccactacgctgcccacatacttaaaccgtatgcgtgtgcgccagacccgcctgcacaacggtgcgaagatcggctactacggcggtgcgcgtgtgatctccggcacaaccgacactctaaagccggacatctccatcgataaccgtgagaagctgacggcaacgttctactgcaacaacccctatgccgatgagctgacgttcaatatcaaggtttcggacggccggaacgaatatgtaaaggttgtaaattacagcgagcttcgccagctgaacagcaaaacttggtactacacgtgggttatggatagcttggaaagcgaaaagacgcgcttctataatcagaccgaccataagcttgcgtgcggcacagacatcaccgtcacgctttccgtagaaagccaaaacgccaatgtggacggcaaaagctacacccgcaaaacgaacagcctgttccgctatgccgagggcaccccggcgggcacggcgctcatcgcctacggccgccatttacagaatttggacgaggcctcccatgtttccgagacgattaccggtgccgtgcaggtcagcgacctttcctttgcggatgatactgccgacaacgaagactggtattccttttacggcgacacctttacgcccatcacaaataagaatctcaaaagctatgacggctattccgaggtcgataacgtaaagctgtattcttccatttcaaacctgtacatcaaaaaagctgcgcaaaacggagatgcaggtctgttcagtacatttaacggtgagatcaaaaacgtgacgcttaccggcatgaagattgataatggcggccagaacgtcggtgcgctcatcggttctgtttccgataccgtgaaaatcacaaatacccgtgtatacctcagctccaaaaaaggcgacctcgcagatatcgaaacggtcgattccccggaaaaagtgcagccgtggctcgagggtaaaatcgtcggcggacttatcggcatggtgacaaaaacgggcagcgtatccgttacggacagctccgcgtctacggtcattcgtgcagacggcgcagcaggcggcctcatcggtgccgtgtatcatgcggcaacgataaccgattcctatgcggattgctatttgaaggcagacagaacgggcggccttatcgcaaaggcagagggcgggtctgaagtggccgcaacgggaacctctatcaccttagaggatttctatgcagcgggttaccaaacggcgaccggcgatgctttcggcttagtaggcggctccaatgtgatcgccacaggcggttattctgcgtgtgtttacaatgttggagaaaacgcaaaggttcattccacggtcaaggcaatgggcagtgcctcaaacgtatattatctgacagacggcggcctttccgaaggcggcacaagcaagtgggaaaacgacaatcaaaccacgccgaaaacttataaagaactcagtgaatcgggctttgcaaaagaaatctccgaggcgttcacgtcgtcctccggcgcggctacgtttccgtataacttgatggatcagggccttacgtattacacgtatccgcgccttgaaaagctgaaccactacggcgactggcaggcggagtttgaatccggcgcactggtttattacgagcgctacgaagacgaaacttacggcttctacggcgcgaacctttccacgctcaaaacgagtaagtttgtcgtcggcgacggctatgcgctggcgtatatcgaaaagaaagatgcgaccgataacgttaccgtgacgtatgcaaacgaccaaacggcacgggtatcgtttggtagcgcaattgaaacgactgacgacgcgacaaatacgaagtattatctctatccgctctcaaaagaggtcgtcaacaccaagtatatcgacaccgcagagccggatacattctaccagaagatcacgatagaagacaccgcaaacaacacgaatacggagtattactacaatccgcatttcgcaaaaacggtgacggtcaacgaaaataagccgcaagcgccggaaacggtctgcatccgctccgcccgccagctgtatgcgttgagcctttactacccgcagtatgcggatgccgtaaaggacagtgtgttccgtcaggaactcaacatcgattacagcaggtatgagtggacaaaatatgatgacgttgtgcctgcaaagattagcacacaggcgccgatcggcacaggggataaaccgtttacggctgtgtataacggcggctgcaatacgataggggaaatttcctttaaagcaaaatccctttacatcggcatgttcggttatacgtcgtccgctgccgcggtgcgcaatgtgttccttgtcggcgacggcagtaacacggtggcctatgtcaatgcgcagggcggtaattcggcttccggcagtgcgtcgcgcgtcagcatgggcgtgctcgtcggttataaccgcggcacggtttcaaactgctcggtttccggctataccatggagtattacggttacagcgccagcacggcttcgctcggcggctttgtcggcagcaactacggcaccatccgcaacagcgcttcggactgcccgtccattcgctttgcaaatacgaactctaacacctatgcgggcggctttgcgggcgtgaaccacgcctctgtttcggattcctacgcgcttggcagcattcaggtgcgcggcgcgcgaaacagcaccgtgtgggtcgcgggctttgcggcgaacaacgccagcggcatgattcgccgcagctacagcgctacggcgctgacagcttccggcgatgcggagtcctacggctttgcgcataccggcggttcggcataccagtgctattatctggacggcggcacgtattcgtatagaggcacgctttatgcttacaacacctccacgaacgaattcaaagataacgcggcgggtgagccccttacgggcagcgagctgcaaaacaaaacaatcagcaatttcaaaaaggcagattgcacctataatgccaaagaaacgaccggcgattattatatctacccggcagtcgtgcgcaatgcagcagggaagaccgtgcattacggcgattggcccgtgcagaaggacatcggtacgctcggtgtgttctactgggaatatgaagacagcggcagcaacagcggctaccacttcagctacgtgggcacaagccagggcaatgaaatttccagcgcaaacaacgacatcttaaagggcgattctctctgtgaagagcacgacgacggcggcgttgtaacgcattacggctacggctatttctatgcgaacagcaataatttgaagactttattaagtgctgtatacttcaatgaaaacttcatgagcgttgcagaaaatgcaaaagccggcgaagcgctcggtaagcagatgcccggctatacgtttgtcgcatatgaaaccggcgaagacaaaatgtatttgaccggcagcaaagcaaacggcacatggtggctggattacggcagcggaacagatgctaccgtatacatctacaccgtcaacccgttctttgcaaactctatgagcctcgatagctccgaagtacagaacaaaatgacaaaaacaggtgacgtcgaacccggcgccaacggcaacgcttacgagattcgctccgtctcgcagctgcagtttatcaactggaattccggaaagcacaatacaagcacctccattgtgtctcagaacaaatgggattggaatacgtttaaggataaatacacgtatcaggtttacggcgatactcgcacggtatcgggaagcggcaaagagctgtattggaatcaaacacacgatttgaatgcttcctcggaataccgtacactcggtaagaccaataacttcacgcctatcggaagcatgtatgataatgcaggcgatacagcaaaagctgatccgacaatgtcatattttgcttctcattatgacggacaggcatatacgatcaaaaatgttgaaattcacagcaatgcggaatgtgttggtatttttggcatcacggtcggtgcaacggttaaaaatgtggtcgtatactcgaatgaaggcaatgtaatcgaagccgcaaaagacggtgtgagctggtattgcgttggcggtcttgtcggctttgcggccggcagagacaatcctgcaagtgtatttacaaactgtacggtttccggctataccattcaggataaccatgcaaacgccccgggttggggcggcggcagtgtcggcggtcttgtcggcatgacaaacatggatattacaaactgctccgctgtaacagatattattatcaatatcggctataatggtgcttatcaaaatctgcgcgtcggcggtattgccggtgtttctcgtggcgcagtgcgatattgttatgccggcggttctatgagaagcacagctaaatcttggtatagtaactataatcagggtgcgaatatctggatgggcggccttgttggcggtattgtcatgcgaaacagcggcggcttagcaactttggttggtgatgtgagtcgtgtgctcaaggttgaaaactgctacagttatgttgagatgccaaaacgtggtaaagccaacgagcaaaatattataaagagtacgcaggcaatcgcctccaatggcgaaatgcaggaaaatttcgcggatgttaaaaacgactatattgagattcataactgctatgcacttgaatccgccgtattaaatacagatgattaccgcaaatatggcggcaataaaactccctcaagttggtataacctgaacctgaacatgacacatcaggataagtgggggcgtgagatcaagttgttcaatgattccaccccatacgtaacgtatgccgaaatgcagagcagcgatttcttaacgaaactgaacaagaactaccagtccggcccaagctataagagcttctccaccgttaccgtcaccgagcaggggcagaacatcgacggcaaatatagctttccgggcaacgatacggcgctgcaggggcttaactatccgttcccgacggttctgacacagacggatatcttcggcagcacagtcaatgtgcattacggccgctggccgcgcatcggtctcttatgggaagaaaactcccggaagctcgacctgcttgcggatatcaaaacgaaagcggaagacagcactttgaacgaaagcgaagacggcaaggcgcttttgcagacacatttgcttatcgccagcagcgacgtagatacgagcgcggagccggaaatcaagctgtacgacgaagacagaaacgagctcacaaacgataaggccgcagcaacagtcagccgcattgcgtataacaacgcgaataactgctacaatgtcacattcatcgggcagaacgtcggcacggtcatcgcagaggcgaagcttggcaattacatcgcgcgtctcacgatcgaagttacggcatcgctcaagctggaggcttcttctacgaacgtttcggtttattccggcgacaccgatacgatcacgctgaccgtaaaggacgcaaacgacaagcagctgcttgccgagaccgaaaagacgctcagatgggagattgctgtcgataacaacggcgtgcagcaggatgtcatcgagtgcagtaaggacgatatcaagctgaacgcagacggcacgttctccttgccacttaccggctttgctgcgggcgaagccacggtgagcatcacgtgcacatatccgtacggcgcggcaactgccgcggagcccgcaaaagaggtcacggctacgctgtatatcagcgctacaacaaagccgagtgatgtgcttggcctggcaaacggcagcgtcaacggcagcgtctataaccagatttctctgccgcacacgccgaaaaaatccacgacctcctacaccggtacgaccgttgaatacccggaaaacggccccgccatgcaggaaagcgcgctgttcctctacgcgacggacgagtataccgatttgaaaggctttacggtcgatcaaatcgagatcaccgcaggggaaacgacctacaccgtggtcacagacggcatcacgaccgatgaaaatcacacctacaaagtgacggtaagcgataagtggacgacagaaacgaacgacacgaagttccgataccgcgccgtaaaggtggaatccgccgcggcaggcgagatcaccctaaagatcgtcctcaaaaacggcgacgtgacctacaacctcaccaccccgtacactattgtttccaatgagtataaggtgaagtttgtaacggtaaacggcgatttggtgctggagaaaaaggtatcttacggcgaaaagccgacgttaacggaagaagaaaagaacaagttggcaacagctattttaggctatacgtttgacttagataatctccccgagattttcgcagataccgagatcaaggcggttccgaacacctataccatccagtttgatgccaacggcggcttgggtacgatgggtgctgtttcgtatgcttatgataagattcaaacaacggacacccttctgcagaatacgttcacaaagggaacatctacctttaagggctgggcgttgacggctacggatgcagagcagtatgcagatgagaactcaattcagagcatcgtaaactccatggcgatggagaataagagcgaactcaccctctatgccgtttgggaagataccgcagcaggcggcgagaccgctgaaccgtaaatcaacaaaaaggcaggtgccgaaaatgcaggcgatccgcagaaaactgaatagtcaaaagggtgcatccatgctgatggcactgctgcttatgctggtcggcatcatggtgagcgcggtcatcatctccgccgccaccagcgccgccgtaaataagcgctcggaaaaagaacagcagcaggcctacctcgcggtcagctctgccgccgagctcgtgcgcgacgatttccaaagccttacgggccggtataaagatgttacgaccacggtgacgcatgcggatggaacgaccactacgacgaatgatacgataaaggccacatgtgcggtgggagatatgatcaatgacatcggcgcacggtttataggtgtgaacacgacgtccacttatgcaaagacctacacgttctccgtagacggttatgaagatgtatcggcagaaatccttgtatcagtcggcaccggcagtgacgaaagcagcaaggtgtataacctcactgcaacattcacaaacggtgtgggttccgaacacccctgccgcatggtgttgactatggagggcaaattgacggaggaaagaacctccggcgatacgggctccacgcaggtcgtcacccgaacactcgaatggaataaggcaaagctgcaaaaggaggtaacgggttgaaaaagctgcgttcacaaaaagcggaaacactggtggaaacgctcatggccatcgtggtcgtggtgctcgttatgctttttctctccaccgcagtttccacggcatccaaggtaaatgccaaggtgcgcaaaaccgatgtggctttaacgtataagaatgccgtcaagggcagcgaaaccaaaacgctgatcattaaggataaaaacagtgccacaaaaatcatccatgttcaagtcgatgaatacacaagcgaaaacggctacacgtattacagggaaagcaaagagcagggggcgggaacttgaagctgaaagataaaaaaggcttaacgctcgtggaaatgctctgcacagtcgccattttggtgcttgtcagcatggtgatggtgttgggggtgcagctcggcgtgcgctcctacgcaaaatccgtttcatattcggaagcgcaggtactgtgctccacgcttacgaccaccatcagcgatgagctgcgctattccggcacactgaaagtagacggcagcggcaacgttacgggctttttcagccagcagttcggcagcggcgattacaccgcgtttaccactacgccggaagggcatgtgcagcttggcggcaaggacattctgcccgcaaaggcgtacccctacggtattaaagctgaggtgaaaagcttaacgtatgacgatgtttcctcccttttcacagtgcggctgagcgtaaaagacagcgaaaataaaaacacgctggccgaaaccacctttgaagtggaaaagctcaatgtgacgaccgaagacaccgcagagggccacgcccgcgccgaagacatccgcaatacagaaaactgagaaacaccgcgccaaacggaatgctccgcaggcgcggtgtttttgcaataaagaatttgtatacgctttgtttttaaaaagtatgatttcatgcgatttttcttgcacgtaaaaagcaaatatgataaaatagaaatacagtgtatttaaatagtgttctttattgtgtagagtagatagaattgctgctttttatccactttttgacgaatttgcagagaatatagcgaattctgtctttggcaagtcattctatcggtaaaaatgaaagcgctttccgataaagaataaattgtgagacgaaacagaaagcgctgcaaggagaaatctatgagtttaaaggaaaaaatactcatcgcggacgattcggaaatgaaccaaatgctccttgaggaaatactcagcgataaatacgaatatgtcatggcaaaagacggcacagaagccgtcgatatcctcgaaaaaaacgatgatatcgacctcgtgatgctcgacatcaacatgccgaaaatggatggtttcggcgtgctggaggtcatgaatctacggcattggatcagcgaggtgccggttatcatcatatcgtccgaaaatgacgtggatttcatccgccgcagctatgacctcggcgcttcggattacatcagcagaccgttcgatctgacggtcgtccgccgccgtgtcgaaaacacgctcatgctgtatgctcgccaaaagcgccttgtgcgccttgtggaggagcaggtctacgagcgtgaaaagacgaacaacacgatgatcaatatcttgagccatgttatcgaataccgcaacaacgaaagcggccagcatattctgcatgtgcgcatgatgacaggcaccctcctgcaccgtttgattgagatcacggataaatacccgctgacggaaacggatatctctatgatcgtttcgatttccgcactgcacgacatcggtaagatcagcgttccgaaagcaattttaaataagcccggcaagctcgaccccgaagagtgggagattatgaagaatcacgccgccattggcgacgccatgctgtacgacctcggtacgcagcaagccgaaacgctgatgaatctggcacatgagatctgccgctggcatcacgagcgttgggacggccgcggctacccggacggcctcaagggcgatgagattccgatttccgcgcaggtcgtcgccatggcagacgtgtacgacgcgcttacaagcgaacgctgctacaaaaagtcgttcgaccacgcgaccgctattaaaatgattacaaacggcgaatgcggcgccttcaatccgcttttgatacagtgtcttttggacgtgcaggatcaacttttcgagaacatgcacacagaccccagacggttcgattaccgtcaggaagcaaagcgtctttccgatgaaatgctcgagcaaaaagaacttatgcctaataaccgtgcgcacagcctgctcaccttcgagcagaaaaaggcggaattcttcgcagagcagtgcggcggtatccagtttgaatttgaccactggacaaataccgtacatctcaaagattggaatgcgccggtcgatcaacgagaaaaatccatgtatctgacggaatggaacgacgtttcgctgctctctgaaaaggattggctcgctatgcgtgaaaagctgaaagcaacaacgccggaaagaccggaagtgaaaatgattgtgcagatccccgttaacggggaatatcgctggcagcgccttacggcaaaatcgctttggacaactaaatacaaaaattatgccggcgtgcttggacgctttgaagatattcaggatgaaatggtgcggcgcggagaagatgtgctcgaaaaatgctctgaatatagtgtgtctcatcttttgaaagatttgagccgcgtgtttgaggttgtgcgccttgttgatccgaaaacgaatgagaaccttgagctggataaagacggcaaagtaattactacgccgatacactgctatgaaatttggggcagaaacgagccgtgcgaaaactgtatttcttcccgctctctggaaggaaaagagtgggtcaccaagctggaaatgcgtgacaggcaaatgtacttcgtgctttctaaacatatcaacgtcaacggacgtacctgcacactggagattgcttcgcatgaagacgaagcggagtgcacacgctgcggcggcgacaacgatgcgccaacgcgttcttcgcttatgaacttctaccgcgataccctgaccggaacgtacacgagactgtatcttgagagtttccagtccaatttggaaagcgcagatgccgtggcaatcgtggatgttgacctttttaagcagattaacgatacatacggccaccctgtgggcgatgaagcgctgaaaaccatcgcgaacacaatccgttccggcatccgcggcagcgatacgctcatccgctacggcggggacgaattcctcctcatcttctccaagatcggcgaagaggtgttctatgagcgtttaaagcagctcagacgcgccgtgcaggagacaaaattgccggattaccccgaggtgaagcttgatgtcagccttggcggcgtataccgcgtacacccgctctccgaagccattcggcaggcagacctgcgcatgtacgaaaataaagcgaaacacgcgaatggaaatcatgtggcatgcagataggaattgcagaaaggtgactgattatgaagcttgaagaattatatcagaaaatcggcggcgacctcaaaaacgtgatgaaacgcatcccgaatgaggcaatgatcggcaagttcgtgcgcaaatacgcaaacgacccgacctataaccggcttacagcagctgtggaagccaaaaactggaaagatgctttcattgcggcgcacaccttaaagggtgtggcacagaacctcggcttcgaccgcctgcaaaaatcggcatccgctttaacggaggccgtgcgcggcgccgttccgctgacggacgaatcgctttttgaagaggtctgcaaagatcagaaggagatcgtggaggccatcgaaaagctcgattgagtggaatttgagcgcgatcaaaagaattgagaaaagagaccgtatgtattttatgagaagaaaaaaccgttcaaaagcctgtaagccggagtacttttgcgctcccgctttggtttctgcacccaaaacgatcttcttttctatgaattgcaagcgatattatatgacttagtaaatatgccggttttatagaccggctttatttgcgtttggttccctgtgtaatgcgacggaacggtttggaggagaataggtcgcgcgctgcggcggcagcttacaatagaggaaaaaaggagaatgccgcatgaatatgttcacaaaacttttggagacgctcggaaataatttctggcttatcatcattctttgccttgaggttattctggcggtttggctgctgtgctttgcacgcggtaaaaagaaaaatcgtgccgcagagccggatggccacagcgtgcaggacgtgctcatgtgcgacttatctaagcaggatgacgaagtatgtctcctgatgcgccgttcagacaaaatgccggtctacgagatgggcgatatcgaaagtctgcttggcatttctctcgcacgtctgcaggaggacattgcgagccttgagccgtgcctgcacgaccgcaaaagcggtcgcaacatttggcgggactatctcgcgtgggacggaaaagaaccgatgaccgcagaattccgcatgcagaacggcgagtggatcactgtgcacgttatgcaaagcggcacaaaaggatacgactttttcgcttttcacaaaacgactgaaatgcaccgccgcatacagggctatgaagagcgcctgatgcaggcggaggaagccaaccagtcgaaaaccacgttcctttcccgcatgtcgcatgagatccgcacgccgatgaacggcatcatcggcatgcttacgctggcagagggcaagcttgaaaaagataaccccgcgatgcagtatcttgagaaagtcgacgagctttccgaccacctgctttcgctcatcaacgatattttggatatgtcccgtatcgaagcgggccgcgtgcagcttgaaagcaagccgtttagcctgcgccagctcgccgaccgcctttatgatatgtttgcaaagaacctcgaagcccgcggcgtgcactacgaggtgcgctttgaagatatgaccgtcgattacgtgatcggcgacgagctgcgcatcagtcaggccatcatcaatttcctttcaaacgccgtaaaattcacaagcgagggcgagatcatcgtcacgttccgccagatgatgcggagtgcaggtcatgtagacctcatggttcgcgtgcacgataccggcatcggcatggcgccggaattcatcaaccgcattttccgtccgtttgagcaggaaagcatagaaaccacgaagcgctacggcggcaccggccttggcatggccatcaccgaccacattgtgcgtttaatgggcggtgaaatcgttgtcgaaagcgagccgggcaagggttccgatttctccgtgtacctgcacctgcccgaagccgaagcgccggagcagaccgcaaaggtcaaggcgttgtccgaagacgatgcagaagagaaaatgcaggacagcttcaagggccgtcacatcctccttgcggaagataacgaaatcaacgcaatgatcgccgttgagattttgcaggagatgggtgccgaagtggacgttgcagaaaacggcgaggtcgcggtagaacgcttctctgcgcagcctgccggtcattacgatttcattttaatggacgtgcagatgccggtcatggatggccgcacagctacacggcatattcgtgcgcttaatagggaagacgcgaagacgattccgatcttcggtctttccgcagatgctttcgtggaggacgagcgtctctccaaagaaagcggtatgaacagtcatttctcaaagccggtcgactttaggcgcctgcaaaaagagatcggtgtgtttttgaataaggataggtgaacgcatggataagagaaagtccataaagactgcggctgcggtgctcaccgcggtggcactgtgcgtaagcagtgtggcggcgtatcagcggcttgggaatacttatgtgccgtccgatcagaagagagacctgcaaacgaatcaggtgctgtttccggaagataaggacacgcaaaacagcgattccggcacgcaggaggatgaaagcgcttactgggaaaaagaccagagcgccgatgcgcagggtcgtccgcagaattcgcagcgtgcagattatctttttgaagatcagcaggtacccgatgcggaaaaccagaattcgctgacaatcaataagccgaatacggatacagatacacagccgccgcagcagagcaatgcgcagcaaacgacggtgcagcagccggaaaacggcaatacgcagactcccggctacgacatcatcgatgataaggataatgccgatatcattatcaataatcctacgcaggtgccgaacccgctgccgtcaaacggtggcaacaataataacggggacagcaatacccccggcgaggataataacggcaccaacccgggcggctccacggcagagccggcgcgtcggcaaacccgacatctgttccgcagcccacaacttcgccgaatgaaacggaagaaccgcagcctaccactgccccgactccggcacctacaccgcgtccggcagataccgcaaaggaccctgtgctcgtaaagccgacaccgcgcccgggctccggctccgaccatatcacgaataaaccgtatgacgaagatcacgtaccgggtatcaatacggatgatacgaccggcgagccgataatcacgattatgaagccatacgattacggtgtacccagcctttacgccggccagaccgtttcggcggaggatatttactgcctgctcgatacctatgtgatcggctccgatatggtcacgtattactgggatgccgatgcttacgataaatacgtgcgcgtcaccggcatttcatacgataacggcaaaacgtggattaaggatttcccggttacgctgccggaagatgtatccgatctgaatgttgtgatccgcacagaatatcgcttttcgcaaaaaagtgcatggcgcgagtatctcgtgccgtataccgttgagcaagtgcgtttcttcctgctttccgagcagatcaaagaagaaaacgccaccatcgattcgtctgccgtccttaacgaagaccagtacccgacggtcggttccgaagaaaacctgttctcttatcagaaaacgttcctcggctttgatgccatggtttccatggacaagcttttcccgggctggatggagcacggcgagcttgtatcgtggttctaccccatagaaaagggccgccacattttggagccggcagattttgtagatgtgccgcagggcttcgatatcgcgctcaactcctactggatggaccgtgatacctatgacataaatttcatgtataacacgctcgtctatcttcaaaccatgaaatcctacacgccgcagtatacgcgtatggtcgattggtggaagaacgaaacaagcgagaacatggcggcacatcgcctctctgtaccgcagtatgtgcaggccattgatctcgattggagcgagaagcttgaggtagattacctcgaagtgccggataccgtcctttatatcaacagcaccgccggtaaccttttggttggcgaaggctatgtggtggacgaaaacaacccggtctacgtctccacggaagacggcatgctgctgaataagaacagaacagaaatccgcgctctgccgtataaggtagaggaaatctccgtgccgaataccattcgaagaatggatattccggcaaacaacagcctgaaaaggattcatctggaggccgaaacagaagaactgccggatatcgattatacatacctcacagactgtgaagtcctcgtgcaggacaatcttttcgagcagatgcttttaaccgacggcaaagcattctcgccggagtccggcaacacgctcgccaaggcttcggcccccgatacgatgtatatggtttcgggcggtatggtgtataccaaagagggtaagctcggtgcagtcgtgggtgcaggcagcagtctcaagctcacaacggccatcaagagcatcggcgaaaacgccttcgcgctgtcaagcgaccttgatacgctcgttatcccgaaagaaatgacgatcctcacactcgataaggattgctttgcgggaagcaatatcaaacgcgtgctgtgcagtacacagacgcaggtggatatgctctcaaagcagcttgcggattccggcgcgccggaagaccttctcctctcgctgctcacaacgacgaaagacggctacgagtattacaccgaagtgaacgcaaacggggaaaagtccggcacactgctctccgtaccggccgacgtcacgcgctttgacggtatcgtcacggccgatgacggcaccgaagtcatcatcacgaccgtcggcacctccgcatttgaaaactgcgattccctgcaatgggccattctgccggaagctgtcaccgagatcggcaaccgcgcgttctacggctgtgatgctctcgagggcgtcatgatcgaaacgacgggcacggttatcatcggcgatgaatctttggataattgcccctcgctgcgctttgtcggctccagagcctactgcggctacatggtgaacggctacgacccggttgtaaaagataaccattacagttctgcctacaataactattacttctatgtaccgacagataacatcggttacagcagccattgcaccagctttacggcagaaagcggtgtggcggattatgaattggtcgatatcggcggcacctatatgctgtatggcatggacgccggttcggaagatgaagacggaaacagtacaccgcctgcaccttggcttgcattacgctccggcaaaacggtgaacagcgaagtcacgctgccaagcaccacagcggagcttttcaactacgccatggcagatgtaacaagcgaaagcggcgcattcaccataaactgggaagacctttcggatctctattacttcgatgcgtacagtttatataaatccgatttaagcggcaatgtgtccgtcggctcggaatggagcacgtggacgattcagatggcgcagggtgcgtttgatagctgtgcggggattacctctgtcacgtttgtcggtacgctcggctccatagaagccaccgcatttgcatattgctcgaaccttgaaaaaatggagttcaactctgtgtcgttctggaacggcgcagcctccataccactgtatgccttcaacggctgcaacgccctgcgtttgctgcagttcaattcgtatacgccgccggagctggaactttccatgaccggctatgacttccggtttaatccgagttggacagaggaggaagaacttcaaaacctgcatatctccatcccgaaaggctccgaaggggatttcatcaaaaagtggcggtatccattcttaggctatctcgatatgttggacaagagcgcttaccagtatatgtgggatgacgtgcagatgaagctgctaaatgagacgatgcgctatccgtccgatgaagaggtggatgctgtaatgtatgaccgtctgctcacgtcggagaaccgcatgcgcgcttatttcggtattgaaaacgccacagagcctacagagtatttcccgtaccgcgtaaatgaaggtgccgggacgatcacgctcatcggctcgccgagcaatttgcagagcatttttgtttccggcgataatatgggcctgccgtccggttgggcgttcgactacatcgcagaaggcgcgttttccaatgcgaaagcgcttgagaagctatatctgctcgatgacctggttggcctcaaccagaacatgctggccggtgtagagtctgagaatgtgacaatctattccttcatgaacagtataccggagcttgcaggttttgaagtcggcacaccgttcacctttggcatagaagacgagagagtttcgtttatggtcgtagattttaacggtgacggcgagctgcaggcacagtacattacggcgtggactttcccgtttgcaggctaccatgaccttgcggaaatgcgcggtatcatcgccaaccggcttttggaggaaaaaggcgaggagcccaccgatgacgagattgaagccgttatttatgaaaagctgctcacggcagaaaaccgtctgcgcggcatcatgggtctggagctgctcagtgacggcgataccctcacctgcggtgtagagcctgtcaagaaggatgacagcaataaagacaccgacacagaggacaaaaaaggcgagaccgaaaatccgggtaaagcgaaagacgcagaactctcggaagggacagaagaaaacggatttaccggcaaggacgcaggcggtacggagaacccggacaccaatgtgcccggaacggaaggtacttccaccaccgcgggagaaacggaaagcgactccgagcccgaagaaaaagcaacagagcaaccgacggaaagcggcagcgtgtcgaatacatcggatacaaatgaggaggaactgtcagaatgatcgtagagcaatccaaagctatccttgcagaggtcagcaaagcctttatcggcaagaacgagatcgtaaaaaaagttttgatgaccatttatgccggcggccatattcttttggaagactgcccgggtgtcggtaaaacgaccctcgctgtggcgttctccaaaacgttgggcctttccagcaagcgtatccagtttacgccggataccctgccgtccgacatcacaggcttcacggtgttcaaccgcgaaacaaaccactttgagtaccgcgacggtgcggcaaactgccagctgctgctcgccgatgagatcaaccgtacctccccgaaaacgcagtccgcactgctggaggtcatggaggagcacacggttacggtagacggcgaaacgcacgtgctgccctcgccgtttatctgcatcgcaacgcagaatccggtcggttccgccggtacgcagtctttgccggaatcgcagctcgaccgtttcatgatctgcctttccatcggctacccgagccttgaaaaccagatgcgcatcattaacgcacagcgttattccaacccgctttccgatgtgcgccccgtcacgaacgcgcagaatcttttggaggtgcagaactacctcacctccgtgcgcgttgcggacagcgtgctgagctacaccatccgcctttgcgaggccacccgtgtgcacccgctcgttgagcttggtatttcgccccgcggcgtttccgcactcgtcaaaatggcgcgtgctggtgccgttttgcgcgagcgcaactacgtggtgccggaagacgtgcagagcgcgtttttcgatgtctgcgcacaccgtctcattctgcgcccgcaggcacaggtggacggcataacggcgcgcgatattctggctgagattttgcagcagatcaagcccggtacggaaaggtaagcggatatgtggaaaaacagactggcctatgggcttgtcctattgacggcaacagtgctgctgttcctatacagtaagtcgtttttgctgacagtgctgattgttttattgctgctcatggttattaacggtatgctcgttttacatgatgcgcacagcattcgcgtttctatgcgtgtccgccccggtgggcagcaaggcaaggacgttaacctgaacatcatcgtaaattccgataaaaagctgcttgccgcgcaggagatctttttggagcttgaaacgcagagcacgctgcttggcaccaaaaaagaaaggcgctttttgcttccgctcacatcggggcagagcaactacacgatcaaggtgcccgcagagcagtgcggcgagctgcgcttttcctgcaaacgcatctgcgtgcgcgacgtgctgaatctctttaacgtgcagacagcaccgtttgcccctgtgcgcacggtcatttacccgcgccgcatgaaggtacagctgttgctttcgcaggcttcggccggtacgccgcagcccgaaggcaaaatgcagaaccgcaagggcaacgacccaagcgagatgttcgatttgcgcgagtatgtgccgggcgatgacgtccgatccattcattggaagctttccggcaagaccgatacgctcattctgcggcaggcaagcgacccgtcgctgtataacatcgtgctgcttatggatttcggcatagagaaaaacggcgaaccgacgccgctcgaagaactgaacgccgcggcagccgtagcagcggccgtgggcacgcagcttgtgcagcagcacatcacgttcagcgccgccgtgcctacgcgtaatggcctcgaaatttacgaggtgcgcacgcagaaggatttccagcagatgctcatgcactggatgtgcttcccactgcagcaaaccgagggcgccggcatgcggtatttcctcacacagcagatggatcgtcagtatgcgcgcctggtgctgctcaccgcgggtccatacaccgcgtccttaaaaccgcttgagggtcgcatcggcactaccgtcatcagtgcggtgtccggcggcaaattgcagcatattgcggtgggcggcggctacgaagtggtagagctgcctgccgagcgaatcgaagatgaagtttaccgcattttgtgctgagagaggggacgcgcatgaaacatccgcagaccgttacggtctacccggaaaaaaacgaaaacaaagcagcgtatctgctgtggcgctccctgcgcgcggccctgcttacggcgggcgcgctcatagcgctcatggtcatctggaatgttgatttaaagggtcttttcgtcttgccgctcggcggtgccgtcacggtgcttctgggctgcatcgcaggggattatctcggtgcgaaaaagaacatataccgtgccgcggcggctgtgccgtggcttgtttttctgccggtctgctttgtcaccggcaacccgctttccggcggtatgagctgggtgaatcgccttatcacgcgttggaatgcggcgcatgagggcggcgcggcactgctgccgacgacagacctcgcaggcgacatcatcgccttcacattgcttttgacaatgctgtgcgcgctcgtatcttggttgtgtacgcgcggcggcagacgcggtcctgttgccgtttattgccttatatgggtgctcatcgggcttgtcggcgaggcattcagtccgcttgcaacggcgcttttgctgtgcggcctgctcggcgagtatacctcctgcaaagctgcttaccgcacgctgcacgccggtgtgatgtgggcggtcacagcggtgtttcttatcggttttgcgctggtgctgcctgcgggcaacatctccgcggttgatacgctgcgtgaaaacaccgaagagggcgtgcatacgctgcgctacggcgaagccacattgcccgagggcgatatctccaaagccgatatactgcacgagaccggagaggagatgctgacggtgcagagcgggcagaaaaagagcttttacctgcgcggctttgtcggcggcgattacgaagacggcgcatggcgcgccatgccggatgcagcctacggcggtgaacagagcggcattttaaagtggcttcaagaccataattttgacccgctcatgcaggtctcgcagtattacagcctgtcaacatcggacagcaaaccgtccgaaaaccgcgtcagtgtcacagtaagcggcgcggaacgctcctacgtctacacgccgtcctctgtttccggaacagattggagcggcgcgtttgaagaaaaagacacgcgctttaacagctttatgctcaccggcgtgcatgaatatacgtttgatgagcgctccggctcccgcccctcggagctgaccgtggcggaagcgtgggtgacagaccccgtgaccgatgcacaggccgcctactgtgaggccgaggaagtttatcgtgattttgtgtacgatacatacaccgctgtggaagcagaccttctgccgcttttgcagtccatgttctgggacaattatgaatcccggacggacggcgtgtacagcgctgtgcgccgcgtgcgcgacgtgctggagtggcaggccgcgtatacggatagccccgaagccgcgccggttggcaccgaccccatccgctggttcttaacgaaaagtcacagcggcaacgcggtgcagtatgcctctgccgccgtgcaggcgctgcgtgcgcacggtatccccgcgcgctacgtggagggctattacgcccccgcagaacggattgcaagcggcgacaccacgctcaccgggcaggacgctcacgcatgggccgaggtatattttgacggcgtcggctggttgccgatcgataccacgccgggctattattatgacgccgtcaccttgcgggatatggtcgatacgccggataacgtgcacaaaacggccgcacttgaagacagccggattgatgtttcgccggtcacgaagccgggcaataactccggcccgtttacagacccggtcggcacggcgatcaatgccgcaaatctgctgcttggcatcgcggcggcgctcgtgctgcttttgaccgtcctctttctgctcttcgagattgctcgcggcgtgatctatatgacggaaatcaaaaagttcaggagcgccaaaaatcaggagcgcattttgttcctcggcagaaagattctttgctatctgcgcctttggaacatagaagccagcatcggctggaacaccgcagaggtagacgcggctatcgtgaacgcgtttccgaatatcgaaccgggcagctacacccgcgtgtgcgagctgctggaaaaggcggtctacggcggcatcgcgctcgaggtgtatgaggagcgcacggtacagagctttttggagcacctcgtcacgacgaacaagaatacaagcttcaaaacgcgttttaagctgcactactcgggccttttgtacccgtggtttgcccgcgcgcaaaaagcacagcttacggattaaaagtattttaatcttataaaagccgatggcagagcgaaaaagcccctgccgtcggctttcgtcattttgcggaaatttcgacgaattgattgttaaaatagatggttttgcaaaaaagtagacaaatttttgatgatatagtatactggcgttaaacgggagagcaagtcgatcttttgcacaaaaacaaataaacggctgaattttcatgttgtcacatgatgagttcagacaacaaaaaggagattttgaaatgaagaaagagcaaaaccggcattcccttcacctcatccgtcaaaacgttccgcagtttattttgctcgttattttttccgtgctgctgggcgtttccgtcatcgcggtgtctgttttgatgaaaatgttcctggacatcgctacaaacgcatgcactatgccgctcaccacatgtctcatcatcgcggtcggcgttttgctcgtgctcggcatctcacaggtcgtcacgtccgttttgcagggcaagctttcctgccgcatggagctttctctgcgcagcgccatggtggagtacctataccgcacagacctaaggacattcgacagcggcgcagcggataactacttcacgcgcatgacaaaagacgcggaaaccctctcgaatttctactccaaaacgctcatcccgagcatctttttcgagagcttcacgttcgtcgtcagctttattttgatgttcctcctcgagtggaaactcgcggtcgtcatgatcgtcgtcgtgccgattttgattttcaccatgatccgcatctccccgaagcttgagatgaacagcattcagatcatgcagaacgaagacaaaaaccgcaatatcttacaggagtttttgagccagtacatgctgtttaagtcctacggcgtgctcggctgggtgcagaagcgcgtgggggatacatacgcgcaaaagcagaagtacgtcggaaaactcagcgttttgcagggcgccatcggtttcctcaataacttcctcggcgtcggtatgttcatcatcgcgctcggcatgggctcgttccttgtcgtgcgcggcgaaacgaccgtcggcacgctcatcgccgtcgtgaacctcgtcagcttcttctacggcccgttcctgcacatttcgggctggatggccgaggtcaacgaagtgaaggtctccacaaaccgcatcggggagatcctctccatgcccaccgaaaatagcacacaaaccgcaaagcccgctgtccaaaatgcaggcagcgcagcgctcaccgccaaagacctctcctttgcgtatgacgaagaaaaagttatcctgtcccacgccgaaacgcaggtgcacacgggcgagatcgtcgcgcttaccggcgaaaacggcagcggcaaaagcacgctcacaaagctgctcatcggcttttatacgcccacgggcggcgaagtcgagctcaaaatcggcaataaaaccgtgcacggcgcggagattcggaattatttaagctacgattccggcttcgtctccgttttcgcgggcacgctcaaagaaaacatctgcatggatcagccgtttgacgagaaaaagttccgcaaggctgtcgaactcgccaacctcacggagttcgtaaacgaaaaaacagcggagtacgagatcgagccagagggcaaaaatctctccagcggtcagcgccgcaaggtcgctttggcgcgcattttctacgacgaccgcccggtcttcgtgctcgacgagcccaccgcgaacctcgataaagcgtccgcagagggcatgtttgaagccctgaagcaggtctgcaaagacaagatctgcatcatcgtcacgcacgatgcgttcatctccgaaaagtgcgaccgcgtgctgcatttgaataacaaaaaggtcacaggatgaccgcaatacgatttgcataataaggcgataggaactctgccactcgcaacgagcggtgggtgtggcttagctccgggcaattccgcccttgcggcaaggctcgtcgtagagaacgcctgcgccgagtggcttataaatcttgagcattgctgatgggccatttttaacgaaatttatcttttttacaaaaaatcaaaattttttcaaaaacctaattgacaaccgaaaaaatgtgtgctacaatgcactaaaccgttgaggaagagtgagtacgctttaggcaacttttctcacagagagtcgtggatggtgggatcacggcggaaagataaagcggaatggacttctgagggcgaacagaaaaggatttcccgagtatgtgagacggagtgtggctctccgtaaacaaaggtctgcgtatgatggtacgcgtaagagggtgtgtgtttcacataccaagccgggtggcaccgcaggaattttgatcctgtcccagcaagtgattgcagggacaggattttttgtttttcagggaggttatttcatgtttgtttacacaaaacgatggcgcagccgcgctgcatccgaaattttgaaccgcatttgaacgcattaaaacaaacctgaaaggatcgataaatttatgaaactcagaaacgtatttgccatgatcaccgctgccgctatgaccctcagcctcgccgcttgcagcggtcagagcacagcttcttccacgtcctccgcgtcaagcgactcttcttcgtccgccgcttccgaaagcagtgtgtcgagtgaaaagagcaccgcaagcgaaaaatcttccggcgcatcgtacaccatcggcatctgcaattacgtcgatgacgcttccttaaaccagatcgttgagaacatcaatgcacgtctcgccgagattgaaagcgagcagggcatcacgatcgaagtgaagtacgacaactgcaacgccgacgcgaacgtcatgaatcagatcatcgcaaactttgcagccgataacgtagatctcatggtcggtgtcgcgaccccggtcgccatggcgatgcagtccgcaaccgaagacagcaaaacgccggtcgtgttcgccgccgtgtccgacccggtcggcgcgggtcttgtcgcttcccttgaagagccgggcagcaacgtgacgggctcctccgataacctcgataccaactccgtcatgaaccttatcttcgcccagaaccccgatgccaagaagatcggccttttatacgacgtaggacaggattcctccaccgctgccatcgagcacgcaaaggcgtacctcgacgacaaaggtgttgaatatgtagagcgcaccgcaacgaccgccgaagaagtcgcgctcgccgcacaggctctcgtttccgacggtgtagacgccgtgttcaccccgaccgataacaccatcatgaaggcagagctcgctatttacgagacctttgctgacgcaggcatcccgcactacaccggcgccgattccttcgccctcaacggcgcgttcctcggttacggcgtcgattacgcaaacctcggccgtgagaccgcagatatgatcgcttccatcctcaccgaaggcaaagacccggcgaccaccccggtcatcacgttcgacaacggcaccgcaacggtcaacaccgaaatctgcgaaaagctcggcctcgacttcgataccgtctccgaagcttttgctccgtactgcacgagagtggaggagatcacgaccgcagagagcttcagcgatctcgagtcttaatttaaatctctcaaaagcttatcctaccccataagctttcaaacacttcatacaccttacttcatcaataccttacttacccattaagaatgcaatcaccgctgccatgcacccggttttcgggcgcgtggcttcggcatatcaccacaaatctgcaaaacgaggagtttttgtatgtctttcgattccatcctgacccttgggcagacagcgctggagctcggtctcatcagctcgctgactgttttggcgctgtttttgagctattccatgctgaacgtatgcgacctttccacagacggttgcttcacgctcggcgcggtcgtcggtgcgtccgtcgcgctttccggacatccgtttctggcaatccccgccgctatggcgatcggcatggtctccggcttcgtcacggcgcttttgcagacgaaaatgggcattgatagtctgcttgccggcatcatcgtcaataccgcgctttattccgtcaacatcggcatcatgaacggcgcgtcgcttctgaacctcaataattccgatacggtcttcaccaaaatgcgttcggtgctcgaaaacacaccgcttgcggggcaatataagcttatcgtcatcatcatcacggttgtactcgtggcggtcgttttgggacttttcctccgcacacgcctcggcctcgccattcgtgcgacgggcaataacccggacatggttcgctcctcgtccatcaacccggttaaaacgaccatcatcggcctgtgcatttccaatgcgtttacggcgctttcaggctgcttgctcgcgcagtcgcaaaagtctgtcagcatcgatatcggcaccggtatggttacggttgcgctggcatcgctcctcatcggcggcgcattcttcggcaagggcaaaattccgctgcgtatcttcggcatggtcgtcggtgcgttcgtgttccgccttgtgtataccatcgcgctgcgattcaacctgcccgcgttcatgctcaagttcgtctcgtccgttattgtcattctggcaatctccgggccgtacctcaaaaaacagcttccgtatctgaagcgccgtttcggaaaggagcgcacccatgcttaaactcacgcatatctcgaagaccttcaaccccggcacggtcaacgccaaaaaggcgatcgaagacctcagcttccacgccgcaaagggcgatttcatcaccgtcatcggcgcaaacggcgcgggcaaatccacgctcttcaacgccatttccggcagctttttcacggacagcggcaagattgagcttgacggcaaggacatcacgttcatgccggagtataagcgtgcccgcagtatcggccgcctgtttcaggaccccatgcgcggcagcgcaccgggcatgaccatcgaagaaaacctcgcgctcgcagcggggcacggcggttggctcagctccatctcccgcaaggacagacaggcgtttcgcgaacgcctctccctgctcggtatgggacttgaagaccgcatgacccagcccgtgggtttgctttccggcggccaacgtcaggcgctcacgcttatgatggccacatataacccgccgaagctccttctgctcgacgagcataccgccgcgcttgaccccgctaccgccgaaaaggtgctcgagatcacgaaaaacaccgtggaggaaaaccacctcacgtgcatgatgattacgcacaatatgcagtccgcactggagctcggcaaccgcaccatcatgatgaacgccggtaagatcattctggacgtcatcggcgaagagcgtgcccacatgactgttgccgacctcctcgaccgcttcaagcaagccgccggcaaagccctcgataatgaccgtatgcttttgagcgaagcagagtaaaatttgaaatcgaaagacagcaaaaagcagatgccccgaatccacatcgggtgcatctgctttttctgttccaaaacggcggggatatccgccgtcgttcctttacggatggtgatgcttttttaatacgatctcccaaatctttatgtgtaaagcgttatttttcctcgttttccggcgcaatctccgcttcaatcttatccaagcggcggttgatcttcttttggttttccagaacaaggtcaagctttttatgcagatcatcgatgatgagctcgctttttaagttgatcttatagtcattctctgcacgctgacggtctttcgcttcttggcggttctggctcatcatgatgagcggcgcttgcacggcagcgatgcacgaaagtacgaggtttaacagaataaacgggtattcgtcaaatgctctcgaacccaaaacgaggtttatgaccatccaaatgaccatgacggcgataaagctgaaaataaacgcccaactgcccgcaaagcgcgccactgcgtccgcggcacgctgcccaaacgtcatgtgctcgtccttgtctgcgttttttgtgacttccgttgcaatcagctgatgaatcagttcctcatccgtgaattcctcgtccgtcacatgtaaaagctcgctgataatttggttgcgtttcgcaccttttttcatagtaaacttacctcttatcccaagattcttcgccgcatttcggcgttatctccagtctattacaaaaccgcgtgcgttgtcaaccgcaaggtgtaaaaatagtgaaaaaacgcacattcgcggttttgccttgcgaatatgcgttttgaaattcaatagactttaactgtcaatggtggaaaggtacagctcggtaatgtccgggtcatgcgcggcggatttcatcagtgtgtcgcaaatggcctgccggttcggaattttattcatggcactgcgcctcctctcgttcgtcaaagtcgtgcatgatgctcttgtattcctcgccatcgcccatcacgatataaacgcggtaacttttgccgctgcgtttgcctgcaagcgccataccgacgcacagtgttttgttgtcagtcctcgtgtaccgtacagagtgggaaatagagaatacctgtggcgcgtctaattgttcctataagcgcaatgtaaaccgctgtattccaatgctgcggaaagaaaaagttatatcgaaagtctaaatggagcaatttcgtctttttggttcgaaaattgccaaaatgtttcttttgagctgtatgtacatcgtgtgcgcgtctgtactgaaaccgcaaaatccggcatgaaacctgtggttgtttaaactaaccgattctgttttaacaaattgtccaaaatggtacggctaacttgcaggttgttttttacaaataatagaaaattgtgttttttgtgtgaaaactgttgaagttaggtaaaaatcgtgctattcttttgccagaacaaacaaggtggtgaatgaatatgaaaatgcataagcattttgcaaggcttaccgttttgttctttgtgctgactctcatcagcggacacatgaaaaaataattttatgagccgcatggttaaaatgcggcccgcaatacaggaggtatttttatgaattgggcaaaaatcggtcttttcgcagcaggtgttctgtttggtaccgccggcatcaaggtgctcagcagcaaggatgctaagaaggtctacaccgagaccactgcagctgctctgcgtgccaaggagtgtgtcatgacaacggtcacgaccatcaaggagaacgcaaacgacatcctgaccgacgctaaggagatcaacgagcagcgcgctgccgatgctgccgcagaggtcatcgaagatgcagcttgcgcatgcacggaagaagctgcttccgcggaagaatccaccgaagcttgatcgcgggtctatcccgggtctgaattaccggagagccgccgaaagcggctctcttttttcgttcatccgctccgcttttcggagcttccaatatattgttgcatagaaggataaagttatgaagtgtaaaattctgcatgaagcgcgcgggcacatgcgtgtacatctcgtctgcggccgcatgacgctgaaagaagccgatgttttagagtattacctgcgcgccgtggacggcgtaaaggaagttaaggtctacgaccgcacacaggacgccgtcatcgtctatcaaaacgaccgcacatcccttattcgtgcgctcgcgacattctcgttcgcaaaagccgaaagcatggagcttgtgccggatcacaccgcccgcgcattgaaccgcgagtttgaagacaagctcgtcttcacggtgctgcgccgcgccatggctaaaatgttcttcccggcgcccattcgcatgatgcttgccatcatccgctccgcaaagtacatcaaagagggcgttaaggcgctgctgcacggccatctctccgttgctgtgcttgatgccactgccgtcaccgtttctcttgtgcgcggcgatttcgatacggcaggctccgtcatgttcatgctgcgcctcggcgagattctcgaggagtggacgcacaaaaagtctgttgccgacctcgcgggcgccatgtccctcaatgtcgataaggtctggctcaagacgaacggcaccgaggtgctcatgccgatcggcgacattcaggcgggcgaccgcatcgttgtgcgcacgggcaatatgattccgcttgacggtaaggtcgtcgagggtgaagctttggtcaatcaagcctctatgaccggcgaatctctgccggtgcagaagtccgtcggcagctacgtgtatgccggcaccgtcgccgaagagggcgagtgcgtcatctgcgtcgaaaaagctatgggcggcggccgttatgaccgcatcgtccacatgatcgaagaatccgaaaaattgaaatccaccgcagaagacaaggcttcccgccttgccgataagcttgtgccgtacacgcttggcggcacggcgctgacctatctgctcacacgcaacgtcacaaagatgctcgccgtgctgatggtcgatttctcctgcgcattaaagctctccatgccgatcgcggtgctgtccgcaatgcgcgagagcagcgcacaccatatttccgtcaagggcggccgcttcatggaggccgttgcaaacgccgataccattgtgttcgataaaaccggcacgctgacgtacgcaacaccgcgtgttgccatgatcgaaacgttcggcgaccgtgaggaaagcgaaatgctgcgccttgccgcctgccttgaggagcattacccgcactccatggcaaacgctgtcgtggccgaagccaaggaccgcggcctctcccacgaagagtaccattctcgcgtggaatacgtcgtcgcgcacggcatttccagcactgtggagggcaaaaaggtcatcatcggcagcgcgcacttcgtttttgaagacgagggctgcgtgatcccggagggcgaagaagcgaagttcaacgcacttccggccgagtattcgcacctttatctgtgcatttccggtgtgctcgcagccgtcatctgtatctccgacccgctgcgtaaggaagcaaaggacgccatctgcgctctgcacgcttgcggcatcaagaaggttgtcatgatgaccggcgataatcgcaagaccgccgaagccgttgcagcagaggtcggcgtggacgagttctacgccgaagtgctgccggaggataaggcgaacttcatccgccgcgaaaaagaaatgggccgcaccgttatcatggtcggcgacggcgtgaacgattctccggcgctgtccgaagcaagcgtcggcgttgccatcaataccggcgccgccattgccagagagatcgcggacatcaccgttgcggcaggcgatctctatgagctcgtcaccctgcgtcagctcagcactgcgctcatggcgcgcatccaccgcaactaccgtttcatcgtcggcttcaacctcatgcttatcctgctcggcgtaggcggaatcatccagccgactacctccgcactcctgcacaatatgtccacactcggcatcagcctcaaaagcatgacagatcttctgccggaaaaagcagaggaagagtaagaaaagaagcttcccgtaacggtggtcaaaagttttcgccagcctttttcaaaagactgcgggtacttaggacagcgccctaagttgcttttatcagaaagcgaaatctctttgcctacataaaattaggaaggttgatttgaatgtccgggggacattcaaaacgtagggaacccagctgcatgggttcctgcaagggcggtcaatgaccgcccttttttacatccaaacccgcgctttgccgcgccgctctgcagtgtcctttcacgctttattgcacaatgggtaaaagggtacaaaaagaaatttaaaataaagcgcatttactactcgacaagatgccaacttaggtgtatactggtagggtgcttgcggcaggaaccgcaaaaacgaacacaatatcttgtggttacgcataaatattcaatataaagaaaattatggaaactgattatgaaaaccaaaggggctggaaacatgcagctcccgcgggcggtatgaaggagcggtaaggaacatgaagatcattaagagaaacggctcggaagcagcgttcgatatcactaagattatcgtcgctgtctccaaggcaaataaagagatcgacgagcgtcagagacttacgaacgaacaaattcgcacaatcgctgcaaatgtcgaaggagcgtgcgtcgccatggggcgtgcagcgtccgtggaagaaatacaggacctcgtagaaaagcagatcatggggcaaggtgcgttcgatgtcgctaaggagtatatctgttaccggtatacgcgttcgcttgcgcgccgcgccaataccaccgataaccagattctcagccttatcgagtgcaacaacgaggaagtcaagcaggaaaacgcgaataaaaatccaaccgtaaacagcgtccagcgcgattacatggccggcgaggtctccaaagacatcacgcgccgcattttgcttccgcgcgaaatcgtcgaagcacacgagcagggcattatccatttccatgatatggactatttcgcgcagcacatgcacaactgtgacctcgtaaacctcgaagacatgctgcaaaacggcacagtcatcaccggcacgctcattgaaaagccgcacagcttctccaccgcctgcaacatcgccacgcaaatcgtcgcgcaggttgcaagtaaccagtacggcggccagagcatcagcctcgcacacctcgcgccgttcgtgcagatctcccgcgagaaaatccgccgggaggtcgaagtcgagatcggcgagcttggcgtttccccggatgaggcccaaatctccaaaatggtggagcgccgtctgcgtgaagagatcaagcgcggcgtgcagaccatccagtatcaggtcgtgactttgatgacgacgaacggtcaggcgccgttcatcaccgtgtttatgtatctgaacgaggcgaaaaacgagcgcgaaaagcgcgacctcgccatgattatcgaggaagtgctgctccagcgttatgagggcgtcaaaaacgaaaagggcgtgtgggttaccccggcattcccgaagctcatttatgttttgcaggaggataacattatccccggcagcgaatactattacctcaccgagcttgccgcaaagtgcaccgcaaagcgcatggtgccggactatatctccgaaaagaagatgaaagagctcaaagagggcaactgcttcccggtcatgggttgccgcagcgcgttaagcccgtggaaggatgaaaacggcaactataagttctacggccgcttcaatcagggcgtcgtcacactgaatcttgtcgatgttgcgctcagctccggcggcgatatggaaaaattctggaaggtcttcgatgagcgcctcgacctgtgctaccgcgcactcatgtgccgccacaaccgtttgaagggcacattgtccgacgccgcgccaatcctctggcagtacggcgcaatctcccgcctcaaaaaaggcgagcccatcgatgcgcttctctatggcggctattccaccatttcgctcggctatgccggtctgtgcgagtgcgtgcgctacatgacgggcaaatcccacacggaccccagcgcaacgccgtttgcactcgctgtcatgaagtacatgaacgctgcgtgcgaaaaatggaaggcagagaccaccatcggcttcagtctgtacggcacgccgcttgaaagcaccacgtacaagttcgcaaagtgcctccagcgccgcttcggcatcatcccgggcgtcacggataagccgtatatcacaaacagctaccacgtccacgttaccgagcatatcgatgcgtttgaaaagctccgcttcgagtcgcagttccaggcgctttccaccggcggtgcgatcagctatgtcgaggtcccgaacatgcagaataacctcgaggccgtcctgcagatcatccgctatatctacgataacatcatgtacgccgagcttaacaccaagagtgattattgccagaagtgcggctacgacggtgagattcagatcgtcgaggatgacggcaagctcgtctgggagtgcccgaattgcggcaaccgcgaccaggataccatgaacgtcgcccgccgcacctgcggttacatcggcacccagttctggaaccagggccgtaccgccgaaatcaaagagcgcgtgctgcacttgtaattaagtcaaaatcaagaataaacagtaccgcacagggcaggcgctttgtgcggtatttcatgaatagaggaaaccatcatgaattacggtgagatcaaaaaaaccgacatcgcaaacggcatcggcgtgcgcgtcacgctgttcgtctccggctgcacgcgccactgcaaaaactgcttcaatgccgaaacgtgggatttcaactacggcaagccgtttacaaaagaaacggaagacgaggtgctcgcagcccttgcacccggtttcatcaacggtttaactttgctcggcggcgagcccatggagccgcagaatcaacgcgctttggtgccgtttctgcaccgtgttcgcaagctataccccgaaaaggacatctggtgctattccggttccaccctggagaccgatatgctgaaagacggcggccgcaaccgctgcgaggtcacggacgaattcctgtccctgctcgacgtgctcgtcgacggcgcattcgtcgatgaactcaaagacatttccctgcgctttcgcggctcgtcgaaccagcgcatcatcgacatgaacaagacccgcgaaacaggaaaagttaccctctggaacgcgaaaccgtaaaaagtaaccgaaaacgccgctcgactgctgtgtttagaacagtgccgggcggcatttttaatttttccacacgcgcagcaacgcaggaattcaaaataagttagaaaaagctaactttttctcttgacattccctaccgccgaggtatataatcaagatacccataaagggtatatgagagtcttctcttacaagaactattttcacaaaaggaagcggtttaaatgcgtacatatattttgaatgcgaccggcgcggacatcagccctgctacgatcatcatctgtgtggtgattgcggctatttgcatttttgcggtcatcagctatcgcaaaaaattgaagaacggctgctgtggcggtggcggcgatgaagtgaagcacgtcaagccgcaggatacgaacgtgaacgactacgaccacgtttaccgcatggacatcgagggtatgcactgcaaaaactgcgccatgcgcattgaaaacgcgttcaacgagcagccggactgcatggcaaaggtcgaccttgccggcaaattcgttcgaatctacacaaagaagcccgtcgaagaagtcgttttgaagcagaccgtctggcacgccggctacgagccgaaaaccgtcaccgccgagaaataagacggaattgaaattcaaagaaaagcgtggtatactctaagaaatccgtgaatttataaagaaagtgatgatagagtatgaaaaaaattgccagcttttccgtcaatcatgataagctcaaaaaaggcatgtacgtttcccgcatcgacggcgatgttgtaacctacgacctgcgcatgaaagtgccgaacgccggagattacctctcaaacggcgcgctccacacgttcgagcatcttttcgccacgtatgcgcgcaactccgcgttgtccgattccgtcatctacgtcggccccatgggctgtgaaccgcaccagattatgcggacagcactaaaagcccccatgtaggatattgagttttaagcggagtggcgcagcgacagcggtgccactcccgtttttgtttggatgcgttcgtggttatagaagtaaatatacctgtcgatcagttcgtttgcttcttggaacgtctttggcttgtggcggtagatgcactctgttttcagaatggagaagaaattttctgccatggcattgtcataaggatttcctttccttgacatggacggcgttatgccgtaagattgtgttagcttgaagtatgcttgcgatgtgtattgaaagccttggtcgctgtggagctgcaactccgcagcgactttctctttcttcattgccagacgaatcgtgtccagaacaagattcacagtctgccgacttgcagtcttgtaggccacaatactgttgtcatacagatctcggatcatggacagatataaaatgccttcttttgtgtggatgtaagaaatgtccgtgacccatttctcgtttggcctgaccgcccggaactgtctgttcaacagattttcgtatttgtgtacctgctgaccaagatttacccattggcggcgtcggcgaacctcagacaataatccatattttttcatgattctgagcacagtcttcggatctctttgaatatttctgccttttaaccacttccatacacgtcgatagccataggtcttatctgtcctgcgctgacattcctcgatttcctttgccacaacagcatcgcgatccgtctctcccagacgctttttaaagcagtagtaaccacttctggataccccgaagaatttgcacataacagatattgggtattctccccggtgacggtgaatgacggcgtactttgcctttggcctcacttcctttctgtggactgcagaaaatcctgcagtaatttcacttccatcttgagccgcttattctcatacttatattcctgcagcgtctttgcaggcttcctgccacgaaacttcggcgcacccttggcggcttttttgcgttgccgcttcagcagattgtgaaccggacggtctccctccaagccaagttccgcttcgatttccctgtggttcttccctgattctaacatcttttctatggtcggtagtagaacctgcatattggtgtatcttcgtttgctcataatgaatcccccctgatgtacttattatcctacatcaggggggattttgtctattgtcctgttttactggttctgttcagctgccgcacgggcttctatttcctcctgcgcgacaacgtgagccgcctagatgccctgcatctcgtgcaggaatccttcgcgttcatccgcgattttgagggagagatccccggcagccgccgcgaagagtgcggcaactacaaagagcacgacctcaagggcgccaaagaaactgccgtcgatatgctcgaggtcctcaaggactggacgccggagaaaatggaatacgaagtgtaagtcaagctaagattaacacccaaagcaccgttttgagccaaaagccaagcggtgctttttactttaaatgcaggtcgaaaatccgggcagaatatttttgaaaaaaagctaaaataagagttgacaatataccctatgtgggtatataatcaagataccccaagagggtatataaagcgaaatcggaaaggagaattccgttggaacatacagaagaaaaagagatgcacgcttgctgcaaaagcaatgcaaccgatacggaagcgtgcacaggctgcaccgaagaaaaaaccgaagagaagtgctgcggctgtcataaaacaaagcaccgctccgatgaggagtacaaaaaactcatccacagattaaaccgcatcgaagggcagatccgcggcattcgcggcatggtggagaaaagcgcttactgcccggacatcctcgtgcaggtcgcggcagccaacgcggcgctcaacgcatttacgaaagagctgctcgcaaaccacatcaagacttgtgtagcggacgacatccgcgcaggaaacgatgaagtcatcgatgagcttgtcgctacgctgcaaaagctgatgcgataattttcggcgcatttttatgaaaggaagggaagaaaatggaacagtataacgtcacgggtatgagctgcgcggcgtgcagcacccgtgtggaaaaagcggtcagcaaggtgcctggcgttacgtcctgctcggtcagcctgctcacgaactccatgggcattgagggcacggcttcgccggaaagtatcatcaaggccgtggaagatgccggctacggcgcgtccaaaaaaggtgcggcacagaatagcacaagccccaacattgctgcagaagatgccctgaaagaccgcgaaactccaaagctcaaaaagcgtctcatcgcgtccgtcggctttttggctgtgctcatgtacatctccatggggcatatgatgtggggctggccgctgccgaattttctcaaagacaaccacgtcgcgatgggcctcatccagttgctcctcaccgtcatcatcatggtcatcaaccagaagttcttcatcagcggctttaaagggctcatccaccgcgcaccgaatatggatacccttgtggcgctcggctcgggcgcgtcgttcctgtacagcacctacgcgctgttcgccatgacagatgcccagatgcgcggcgatatggccgctgtcatgggctacatgcacgagttctacttcgagtctgccgccatgattttaacgctcatcacggtcggtaaaatgctggaagcgcgctccaaaggccgcacgaccgatgccttaaagggcctcatgaacctcgcgccgaaaaccgccgtgctcgtgcggaacggtcaagaggtcaccgtgcctgtttccgaggttcgccgcggcgatgtgtttgtcgtgcgccccggtgagaatatccccgtagacggcgttgtcttggaaggcgccagcgccgtcaatgaatccgccctcaccggcgagagcattccggtcgataaggccgtgggcgatgctgtttccgccgcgaccgtaaaccagtccggcttcctgcgctgcgaagcaacgcgcgtcggcgaagataccacgctttcccagattatccgcatggtcagcgatgccgctgccacgaaagcgccgattgcgaagatcgccgataaggtttccggcgtgttcgtcccgaccgtcatctgcatcgccgttgttacgttcatcgtctggatgctcgttgggcagacgttcggctacgcgctcgcgcgcggcatctccgtgctcgtcatcagctgcccgtgtgcacttggcctcgcgacgccggtcgccatcatggtaggcagcggcatgggcgcgaaaaacggcatcctgttcaaaactgccgtttcgctcgaaaaaaccggcaaggtgcagatcgtcgcgctcgataaaaccggcaccatcacaagcggcgagccccgcgtcacggatattttatccgccccgggcatcaccgaaaaaaaccttctggaagccgcaagcgcgctcgagaaaaagagcgagcacccgctcgccaaagccatcatggcgcgcgctgaggagatcggcgtgcaggcaaaagaagtcacagacttcatggcaaagcccggcaatggcctcaccgctgccctgaacggcgaagttctcgcaggcggcaacctgaagttcatctccacgcaggcagatgtccccgcagattttaaagaaaaggccgaagccctcgcgcagtccggcaaaaccccgctgtatttcagcaggggcggtaagcttatcggcgttatcgccgtggcggatgtcatcaaggaagacagcccgcaggccatccgcgagttgcagaacatgggcattcacgtcgtcatgctcaccggtgataacgcccgcaccgcagaggccatcggccgacaggcaggcgttaatgaagtcatcgcaggcgttctgccggacggcaaggaaaacgtcatccgcaagctcagagagcagggtgaagtcatgatggtcggcgacggcatcaacgacgcgcccgcccttaccagagccgacatcggtgtcgccatcggcgccggtacggatatcgccatcgacgccgcggatgtcgtgctcatgaagagccgcctgtccgatgttcctgcgggcatccgtttaagccgcgccacactgcgcaatatccacgaaaacctgttctgggcgttcatttataacatcatcggcatcccgctcgcggcaggcgtgttcattaacctgctcggctggcagctgaaccccatgttcggcgcggcagccatgagcctttcaagcttttgtgtcgtcacaaacgcgcttcgtctgaatttattgaacatccgcagcacgaagcacgataaaaaaataaaatcggcaaaacccgccgaaacgaaaaccatcgaagtaaaggagacaaaaaccatggaaaaaacaattaagattaacggcatgatgtgcccgcattgcgaagccactgttaaaaagtgtctggaggcattcccgcaggtcacatctgcagaagtcagccacgaaaagggcacggcggtcattcagctcaatgctgaaatttccgatgccgagctcaagaaagccatcgaagataagggctacgaggtcgtagactgagttcgataaagcttgacacaaatttaatctgtgttacaataaaagcactgcctgtgtttgcgggcagtgcttttgcattttacaatttgttcacagcaaattggctttttagaaagaataacggcgtaaaattaacataaagctaacgtaaagcaaacggataaagtttcgcccgcctttttcaaaggcggcggattccaaaggcagcgcctttggtcgtcgttcgcaaacgacgaaacctttttgcctccccaaaaaccaggaaggtaggctcaacagtccggtggactgttgagccgtagggaacccagttgcatgggttccctgaaaggcggcacaaagccgccttttcaaaaaccacacagccaaagaatactaaagaagagatgaggaaatcacatggcacgagagcggtatctgctggacgatacggaagacaccattcataaaaacgaaatcaagccgcagaccgcggcggataaacgcaaaaactggtgggattatcacaaggtgcacgtcctgctcgtcgcgctcgccatagccgtcgtcggctatttcatatattcggtcacatccaaaacggaacccgattataccatcaccgtcatgacgcagtataccgtgccgagcgacctgcaaaccgatattcaggagcttttcgagaaatatgcagacgaccgcaacggtgacggcaaaacatacgtcgccatgaatttctgccgctttaatacaagcggcacctcggagtttgaaacatcagagctgcaggcctcgttcgtcaagttcgcgaccgatgcctccgccggtgacagcatgattttcgcttacgacgacgcaagctataaatacctcgatcaggacgatttagaaggctttttcggccccgtagacggcaccgataacgactattacctctggaaggacattccggcgctgaacaacttagagctcaaccactataacgaggagggcgcaacgaaagaaagcgtgctttccgtcctcggtgagctcaaggtcgccgtccgtacagaagacggcgccgcgttcaaaaagcaggaaaagatcgattaccgcaatgacagcgtcaagctgtacgagcgtcttttgaacgacgcacccgcaaataccgaaaattaaatgagagagctgcacatttttacgcgcagctctcttttttctttgacagaaccacgcagacggactataataagcacatagtataccatgtcggtatacatcatccgaattcacgaaaaaggatgggataaaaatgaaactgaaacaacttttaaccgccatcaagtatcgcgcggagcaggtgccggacgtcgacatcaccgaccttgtgtacgattcccgtaaggctgtgccgggctgcgcgtttgtttgcctgcgcggtgcgaatgcagatggccataagtacgcgaaaatggcagcggaaaaaggtgccgccgtcatcatcgcagaggagcccgtggaagcgcccgtgccggtcattttaacggataacacccgccttgccctcgcatgtttgagcgccgagttcttcggccaccccgcagagcagatgcacgtcatcggcatcacgggcaccaagggcaaaacgaccaccgcgttcatgatgcgctccattctggaggccgcaggccataaaaccggcgtcatcggcactatcggcgtactgtacggcgataccctcgttcaaaccgataacaccacacccgaaaactacgaggtgcagaagttcatgcgccaaatggtcgacgccggctgcgaatactgcgttatggaggtctcgtccatcggcctcaaggatcaccgcgttgcaggcttcacgtttgagctcggcctcttcacgaatttctccgaggatcacatcggcggcgcagagcataaagatatggcagagtacatggcgtgcaaaagcatgctgttccgcatgtgccgcaccggcatcatcaatatcgatgacccgaattataccggcatcatcaaaaatcatacgtgcaatattgttacctacggctacgataaatcggccgatcttgttgcgcatggggaagaactcgttaccacaccggggttcctcggcgtgcgcttctccgtcacaggcaagctgaattttaccgcggatgtcgccatccccggcaagttcaacgtctataacgccctgtgcgccatcacggcgtgcagcgttttgaatatccccgtcactgccatgcagcacgggcttaaaaccgtcaaggtcaagggccgcgtggagcctgtgccgatgcccggcgatttcaccctgctcatcgattatgcgcacaacgccgtcagcatgcagagcattttgacaacgctgcgcgcctataacccgaagcgcctcatctgcatgttcggcgcaggcggcaatcgccccaaggtgcgccgtttcgagatgggcgaggtcagcggcaatttagccgatctctccgtcatcacggcagataactcccgttacgaaaatgtgctcgatattttagcggacatcaaggtcggccttgcaaagaccgacggcaaatacattgaaattcccgaccgccgcgaagccattcgctggtgcattgaaaacgcacaacccggcgacattattgttctcgcaggcaagggtcacgaagattatcaggagatcgagggtaagaaatacccgtttgacgagcgtgtcgtcattcgggaaatccttgattccatgaaacaaagctcataaattactttcgggaaaggacttgtgcagaaatgaataaggaaatcacactggaacagctcgcttcttatgagaccgcgttcgacagcgaccgcgcgaaccgtatcgccatggatgctgccacgaagaatggcgtcaacaatgccgccatgcgctttgagaacgcccgcgaaatgcgccatacgttcaacatttctttggagcagggcgacatcacgaatcagaagcagagcggccgctgctggatgttcgcggcgctcaacaccatgcgcttccgcatcatcaaaaagctcggcgtcaaaacgtttgagctctcccagaactacgcgctgttcttcgataagcttgaaaagagcaactatttcctcgagagtatcttagagacgctcaacgagcccaccgcaggccgccttgttacatatttgctttccggtccgctcggcgacggcggtcagtgggatatgttcgcaaacctcgtagagaagtacggcgtcgtgccgaaggaagtcatgccggaaaccgccgcatcctcctccacgcgtgagatcaccggctacctcaccgaaaagctgcgtgagtttgcctgcacgctgcgcaccgcgtatcagaacggcgcttccatggaggagctccgtgcaaagaaggacgacatgatgcagaccatctataacatgctgtgcatcagcctcggcaagccgcctgtgaagttcgatttcgaggtcaagaccccgaacggcttcgtgcgcgacctcggcatcactccgcagtcgttcttcaaaaagtacgtcgacatggatctttcccggtacatcagcctcatcaatgcgccgacgtccgataagccctacggcaagacctacactgtcgcgttcctcggtaacgtcgcagagggccgacccgtcaagtacctcaacctgcccattgaagacctgaaagcggcagccatcgcccagatgaaggacggcttgccggtttggttcggctgcgatgtcggcaagcgcagcgttcgtgacggcggcgttatggatctgaacgctctcgacctcgaaacgctcttcaacaccgagttcaccatggataaagctcagcgcctcgattatggccagagcctcatgacgcacgccatggttttccagggcgtcaacctcgacgataacggtaagccgaaccgctggagagtcgaaaacagctggggcaaggatgccggtgtagacggctactacatcatgagcgacgcttggttcgacgagtatatgtatcaggtcgtcgtcgataaaaagtacctcacagaagaacagcgcaaagcgcttgagcaagagccgattacgctccagccgtgggatccgatgggctccctcgcttcggtgcgctaaatgaaaggaaactactgcatttatgaatttaaaggtatctgagatcgccgaaatgtgcggcggcaggctcgtcggcagcggcgaaaataccgtcacgtcgttttataccgacagccgcgagacgacgcccggcaaaatgtttgtgcccatccgcggcgaaaacaccgatgcacaccgctttatcccgcaggtcttcgcatctggcgcgtcagcgactttttccgaagagccgctcgatgcccccgcaggcgatgttgtctacgttgaaaatacccgcgcagcactgcaaaaggtcgcggaacgctatcgcgagcgcttcaatatcccggttatcggtatcacgggcagcgtaggtaagaccaccacaaaggaattggtcgctttagctgtttccgccggcctcaaaacgatgaaaaccgccggcaacgcgaacagccagatcggcctgcccatgaccgttctgcgcatcacgccggaggacgaagccgccattgtcgaaatgggcgtcagcatgcccggtgagatggcgcgcatcgcaaaagtcgcaaagccgaacatcgccgtcatgacgaacatcggcgtgtcgcatatcgagttcatgaaaacacgcgagaacatcatgaaagagaagttcggcatcacggattacctgccaaacggcagcaaggtattcgtaaacggcgatgacgacctgctttccacattaaaaagcaccccggaaaagcagatcgtgcgcttcggtctcggtgaaaactgcgactggcgcgccgtagagcttgaggccgatacggagggcacaaagtttatctgtgtgcacgacggtaaacgcgtagaaatgtacgtccccgctgccggcgagcacaacgtgcgcaacgcccttgccgccgtcgcggtcgctgtggaagtcggcgttccggaggaaaaagccgtcgcggccatccgcacctatgcaccgcccgccatgcgccagcagattaaagaagcgcacggcatcacgctgatcgacgatacctataacgccagccccgattccatgcgtgccgctttgaaaattctcggcggtctgaaagcgaccggcaaaaagtacgccgtacttgccgatatgctggagctcggcgattacgcagagcgcggccactatgaaaccggcgcgtttgcggcggaaaacggcaccgatgtccttatcggcgtcggcccgctcgcaaagcacatcgtcgagggctttaaaaatcgtgagaacagcgcgtggttcgcctcgaatgcggaagccatcgcgtatctgaaagaccgtctgcatcccggtgatgccgtgctgtgcaaaggttcccgcggtatgcacatggatgaaatcatccatgctctttcggaataagcccgtatactataatatatttaatatatatcacaatataaaggcaaaagccggcaagttccttttcacttgccggttttttgcaaaacggaggaaagttgtatgaaaacaagattactgcgcccggaagaaaactggaaatcaaatctcaccatggctgtcgcctttgagggagattacgacctcgaaaaagccaaagaaagtgctgcccgtgagcgcaccgaagaagaaaagagggaagatgcccgcaaccgatgcttctgcacctttttagacgacgatgagaccatctgcggcgtcgtgaacagccgcgagtacctctgccgcttcgacggcggcacgtataagctcggcggtgtaggcggtgtttctacattgccgcagtaccgccgcggcggcgttatccgcgcttgcgtgacggcctctctcaaagacatgtacgcaaacgatttcacgttcgcttttttgtatccgttcagcatgcagtattaccgcaagttcggctttgaagccggtgcgccggaataccgctggtcggtgccgttcacagcgatgaagccgcaggatgtcggcgggcacgtcgagcagatcttccccggcggcgattttaccccgcttcttaccgtctataacacgttctatgcagaccacaacctctccgccgtccgcgaaacgtatgataaaggtctcgaaaaagcgaacctctggaacgataagcgctacgtattcgtctggtacaataacgaaaatcagccgcgcggcctgatgattacccataaaatcgaagaaggcggcgtcacatatcttgactgcacccacacgttccaaagccccggcggtttcctcgcgtgcgatgcagaagcgttcaacggcttgctgttcttcgcaaaatccgctttctcgtcggattacgagaagcttcgctttaccgtcccgtccgatatgcacttagagcagctcatcggcgaaaacacgcgcacgttctgctccgtgttcccaaacggcatgctgcgcgttgtcaacgtcgagcgtgttttagaaaactgtgcttgccgcggcacaggggagatcaccctcagtatcgaagacgatatcatcacggaaaataacggcacatggcgcctgcactttgcccccggcgagcaaaataaagttgaaaaaaccgatgccgtaccggacctcatcctcaacatccgcgccttttctgccctcatcaccggcgcccgcgccgccgccgatatcccctggatgcctgacgtccgcctcctccgccaagctcccaccgttcccaacgtcttctaccccaaaaagtgctccatgatggatctgttctaagcatattaattttattgtaggattattagtaacaattacgaaaaaaagaagagattatggggggtaattagtgcgttgcacaggatttaaaaaacgaattgacaataagcgtgtcgaatggtatcattaaaaatgtgtaacaatatttattaagaatataaggtgcgtgaatataaatgaataacagaaagtttgcgctttctatgatcatgaagttctccatttttgcattgcaattcggcttttttgccatggttttgttccaatattacggcccaagacttttccgtagagcagatagcatcggatatgcggtcacattgattctctatgccatcgtatacgtagcactcggcaatcttttccgtgcgtttaaaattacagattattccatagcagaaactattttttcgcagttcctgtcctttggcatggcagatttgctgctctatggcgaattctgcatgattcgccataattatgtaaacttaattcccggcattctcacggtgctttgccagcttttggcggcagcgtgctgggctcttgtcggcaagcgttttaccatcgcgttcggcaagccggaaaagaccctcgtcatctccggcgcggataatgtgaatgagtttctacaaaaatttgataagattggtcatattttcaccatcgaaaaggtcgtttctgcggatattctgaagggcgactggaaaaaagaagtcgctccctatcaagctgtcattttctatgaggtttcctctaaaaagcgttcagaggtgatctggtactgcatgcagagccgcaaaagcctctatatcacgccgcagctcagtgagatcaccatggaaggcttcggagcgcgtcatctgatcgatacgcccatgatgaaatatgagtaccgaagcgagcgtttctggtacaaccttgtcaagcgcgtggtcgatattctgctttcccttacggcacttattctgctttccccgctgcttcttcttacagccttggccatcaagctcgaggatcgcggccctgtgttctataagcaaaagcgctgcaccaaaaacggcgaggtttttgaaattctcaagttccgtagtatgatcgtagatgcggaaaaaggcggcaaatccattccgtgtcgctccggcgatccccgcatcacacgtgtcggtcgcgtcatccgtaaactgcgcatcgatgaattcccgcaaattattaacgtcttaaaaggtgatatgtccatcgtcggcccacgcccggagcgcatcgaacacgtggaagaatacacaaaagaaatccccgagttttcctaccgcctgcgcgtcaaaggcggcctgaccggctatgcccaaatttacggcaaatacaacacgagcccctacgataaactgcggctcgaccttcagtatattgaaaaacagtcaattttgcttgatttaaagctgattctgctgacaatcaagatcatgttcgtgccggaatctacagaaggcttcacagaagagaagtctgctcagatgacggagaaaaccaagagtataaatgaaattgaagaataaattcttgatttaataattggaaggagaattagtatgcgtaaaaagtatgattatctcattgtaggcagcggccttttcggttccgtatttgcacacgaagctacactgcgcggcaaaaaatgccttgtgctggagcgccgcgatcacgttggcggcaatatttattgcgaagagatcgaaggagtcaccgtacatcgttacggtgcacacatttttcatacggcaaatcgccgcgtatggaaatatgtaaatgatttagcagagtttaatcgtttcacgaattcaccaatcgcaaattataaaggcgaaatctacaacatgccgttcaatatgaatacgttctcgaagctttggggtgttgtaacaccggacgaagcacgtgaaaagattgaagcacagcgcggcgtcgtaacaggcgaacccaaaaacctcgaagagcaggcgattcgccttgtcggcacggatatttacgctaagctcatcaagggctatacggaaaagcaatggggcagaccttgcacggagctgccggcattcatcatcaagcgtctccctgtgcgctatacgtatgacaataactattttaacgatccgtatcagggcatcccagtaaacggctataatgagattattgataagctgctcgatggcattgaagtgcgcactgatgtggattatcttgcgaatcgtgcagcgtatgatgcgcttgcggaaaaagtcgtttatacaggtacgattgattcttattttgattataaatgcggtgagcttgagtacagaagcctgcgctttgagaccgaagttttggatacaccgaattatcagggcgttgcggtcgtcaactatacggaccgtgaaacgccgtatacgcgcatcatcgagcacaagcattttgcgttcggtcagcaggaaaaaacggtcatcacgcgcgaatatcctgcggtttggcagcaggggatggaagcatattaccctgtcaataacgaaaaaaacagcgcgctttatcaacagtataaggcactggccgatgccgaaccgaacgtgatcttcggcggcagattggcagagtataaatattatgatatggataaggttattgaggcagcgctttcggctgtggaaaaagaatttgcggagtaagacattatgatggaaaatgtaaaagtcagcgtgatcatgcctgtgtatggtgtagaagcttacgttggcaaagcaatagagagcatacaaaaacagacttataaaaactgggagtttttctgtgtagatgacggtacaaaggatcgcagcggtgagatttgtgacgaatatgcagcaaaagatccacgcatcaaagtcattcacaaggaaaacggcggtgcgccaagcgcaagaaatgtcgcaatcgatcaagctaccggaaagtatttgtattttatggattccgatgattgggcggagtcgaccatgctggaagatatggtgacggcagcagagaagaacagttcccagtttgttgtaacgggcttttatattgatacgtattacacggattcggaaaaatttgtgcaggagcaggcgtataaggattgtgtgtatcccacacaacaggcgttccgtgaggacgcccatcacctgtttgatctgaatttgttgtattctccgtggaataagctctttttgacagagtatgtaaagggcaacggtatttattttccgcagaccttctgggatgatttcccgtttattttaagcgttatccgcgatgtggagcgcgttacggtgctttccggcaagtattatcactttatccgcaagcgtcaggaaagtgagactgcgcgttacagaagcgatatgtacgataagcgcgaggaagaacacggctggatgattgacctttataagcactggaatattcatacgccggaaacagaagaattcctcgcacgccgttattccgagcgccttatcggctgtatcgaaaatgtaacaaaccgcaactgtacgctcaccacaaaagagaaaaaagcgaaaattcgtgaaatgatttctaccccgacagctatgcagtctgtaaagctcaccaaagcgcgctcagcctatatgaagctcatgcttgtgccgcttaaaatgcacagcactgggctgacgtatcttgaaggtcgcattatttccaaggtaaagtccggtaatacagagctttttgctaagctgaaggccggtagataacggaggctgtaaatggataagacaactccgtttttcagcatcgtgatgcccgtatacggcgttgcggattatttggaacaaacgctacaaagtgtggctgcacagacttttgaagattttgaagtcattttggttgatgactgttcgccggatgattctccgaaaatttgcgatgcgtgggtcaaaaaagacgagcgtatgaccgtactgcatctgcccgaaaacggcggcctcagcaacgcacgcaacgccggtttcccgcatgtgcgaggagagtatgtgttctttatggattccgacgacgtgatcgatgcgaatctgctggagcaagtaaaagcctctttggaagtaaacagggcagacgttgttgttttcggacttttagagcagtattatgaccgcgcaggtgttttaaagcagactttcccggtcgcagtggaaaaaacgctgtatttgtatacgccggaagacgtgcgccgtgaggttattcatttggaggaaaaaacgctgtacggctatgcgtggaacaaagtctaccgtgttcagtccctgcgtgaaagcggtgtggtatttgaaaagattacgctgattgaggacatcaaattcaacgtttcttattttgattcggtgtgctccatgaacgtgttgaacacaacaccgtatcattacttgaagcgtatagacggcagcctgacgaataaatttttgccggattacttcacactcaacgcggagcgggttttcttggtgctggagcagtataaaaactggggcatgtgcacagaagaggtgcgcagaattttagccaatatctatgtgcgctacctgttttccgccttgcagcgcaactgtgataaacgctctgccatgaaccacgcacagcgcaaagaatggctcaagcagcagtataaaacgccgttgtgcaaagaactgctgtcggcggttcaggcaagcggcacgcttttcaagtgcatggcaaaggcgctttgtgcaggcaatatcccgttgtgcctgatgattgctcgcagtatttttgcagtaaaaagcgcgtttcccacggtcttttcgacactcaaacaacagcactgaccgaatctgcttgtttttaggagaaagtatggaagttctgatcggatatatgatagacggcagaaacagcggtattgataaatatcttttgcgtgttctgcgtgtcttttatgatgcaggtatacacgcggacattctcacaggaaaggataatgtagatttacgtgcctgcttagcgccgtttaaagcagaaattcacgagattcccggattgatgcacccgcaaaagcagtataaagcgatgcggaaaatcttatctcaaaaatcttatgatgcagcatatttcaatatttcagagccgatgcactgtattggtgccaaagccgcacacgatgccggtgtaccgcgcgtgattttgcatagtcacagcacgtcccagagagaatgcagcatagtaaaagcgtttttgaagtctttcatgaatggcagaagccgcaacaagctgccaaagtacgccaatgattattacgcctgttccaaagccgcagcaaaatggttgttcccatcggaattggttgaacaaaacaaggtgaaaattctatacaatccgatcgaagtagagcgctatgcgtttgattctgctgtacgcgcaaaaatgcgcagtgtactcggattttcggagaaagacgttgtgctcgggcatatcggtaattatgtcacggctaaaaatagcgcttaccttttaaaaatcctgcaaaaaacacgtgaaaagctgccgaatgccaagctgcttttgattggtgatgggcctgatcgtctggcggtggaagcacaggcaaaagaaatgcagctatttgaacatatgcagtttttgggaattcgtgacgatgtaccgtcgcttttgcaggcgatggacgcatttttattaccgtcacttttcgaggggttgcctgtttctgcaatcgaagcacaagttgcaggcttaaaaacatttttaagcgaccgtatcacggatgaagtaaagctcacagatgattgtgtttttcttgatatcgaaaacaacggaggaacgtgggcaaatgcgatcgtaaatgcacagccgtgtgttcataaggatgtccgctcgttccgcgaacaaattcgtccgtttgacttagacgcacaaaaagaggagatattatccatattgggttagggggagaagttgttatgaaaaaactcgccgaccgcacattttggtggattgaactatttgccggcttagggtttatgaccgtcggcttctttcaggattgctcgctgacattcggtacggcaatcatttctttagcattatggccaacactgtttttatctgccgcagcttgcatatatcgacttttacactttaagacgtacagcaaaagccgtgggttttggctgattgcagcactttgcgtaacctatctgctttcaacctttttgaatcgccggtatggttggtatgagaatatccgaacactcatcatgcagggaatcttattcttaatggtgtattgctataaggagagtcgttccgcggaagatataagaaagcggcgcgtttggattggattttatttaagtgtatgtgctgtgctgaccgttatgagctttgcttatatgcttctcggaaaaaatgagatcttttatcccgaaacaccggaaatgccgctttactatacaggcttttactggggacgcctctacggtgtctattgggatccgaatatcggtgctttaatgtgctgcgtctcacttttgcttgcaattggtgttttcagtaaaaatcacaacatcattttgcgtattgcaatgggctgtttagtggcattagatgtgttgtatatcacgttttcagattcccgtgcgtgccgcattgcgctcactgtcggcgtggcggtttgtgccgtgctttatacggttaaaagccgcagaagaggagttaccgttttgcttgctgttgtagcggttgtagcctcggtagctttgccgacagctataaagacagtttataataacagtgtggcagttatggagaaaaaagaaactgtgagcgcaagcagttcagcgaaaccaagtgcagcagcaaagccaagcgctgaacccgacgcaacaaaggtgacaatccgccccaaagaaacgaacgcggcagatatatcaaatcgccgtatagatatttggaaaagcgcaatcgagatatttaaagaaaaaccggttttcggtgtggggcataacacagttttggcttacgttgaagccgaacaggaagattcctatttaatcaataacgaccacatgcacttttccagtatgcacaacgccttctttgatattttagtcgcacagggtgctgtgggcttgcttttgtatcttgcgttggctgtgtggtgtatcattgccgtatttaaaaattggaaacagatttctatgcagctgcaaggaatcgcaccggcgtatttagccgttttggcagccatggtgtgtgcaagctgttttatgtctgaaattttgtacgtctgttcaccgatgtcctttatgttctggatggccttgggtgcactgatgcagattgtaaaaaaggaagagggggaacattatgcaaaaagtgctaagcatctcagtcgcagcgtataacgtagaaaaatttatcgaacagtgtcttgattcctttatcgatcctgcaattttagatcgtgtggaggtcctcgtgaccgatgacggctccaaagaccgcacgccggaaattgtttccgcatatgaaaaaaaatatcccggaacattccgtttgatctcacaaaaaaatgcaggacccggttccactgtaaatagcggcatcaagcacgctactggaaaatattttcgtatggtagacggtgatgactgggtaaacacagcgcagatgggcgcttttctggatatactggaaaagacaaatgccgatatggtctgtgcggatcattgctgtgtggaccatgaaacagggcaaaaaaaagaagagaaaacgaacgttgctccgtgtatggacgtgccgttttcttctgtttgcgatcaactcaccgtggcgatgcacaatgtgacctatcgcacggatattctgcaaaagaataacattcatcttgataactgtttctatacagatgcagagtaccttttgtaccccatcccgtatgtgaaaacagtcaccgttgcaccgcaaacaatctatatgtatcgtgtttcgctttccacacagagcatgaatatcaacagcttacagcgcaactgtgcgatgcacgagttggtactcggtcacctttccgatgcatatgcggcgtatgaaaacagcggtacgtcagaaccgaaaattgccgcattcctgcgcagaaatatcgcccgaattgccggtatgcagcttttcatttatctgacagccacagacagcaaagcggcaaagcagtccgcaaaagctatggtgaaaacaattaaaggtaaaagcgaaacgctttataccgaactcaatggcgctaagagctttaaaatgctgacatctacaaacttcctgcttttcccggtactcgcttccatgaaaaagcgagaagtcggtgcgaacgattaagaggacaacatggaaaaaacagtagaacgaaagcgaattgtttattttgatgtgttaaatgttttggcatgtctttgcgttgtaggcatgcattgcaacggcgcagttcatgcgttttccgattcttctggctgctgccatttttgtattcataaagtatgcttgcgattatccgatttttcaaaacgagaaatttatccgtctcatcaaatggctttcaggggcaagtcttggaatctacttgatacacgtgctggttatcgatcgaattacatcgtggttttcggtcgatacattaagcggatggtggcggctattcggtgcgtttgcggtttattttgtcgctctgctgattgtaaaggtattgcagaagatcccgtatgtcggcaagtatttgtttccataaagatatatacggtaagaattgcggagcttaccgtgcggtttagaccgaaaggataaaggttctgcttatgaaagggaaatccctgaaattaaattttgtgatgaacgccattctcacaatgtcgtccatcatttttccgctcatcaccttccgctatgtttccaatattctgttgccggatggaacaggcaaggtttcgtttgctatctcgttaatcacctatttcaacatgtttgcacagctcggcatcccaatttacggcatacgcatctgcgctatggtgcgagatgaccgggagcagctgacgcgaacggcacacgaactgctcgccattaaccttgtagtcggggcgttatcatatgttgcgctggcactggccattatttttgtgccgcggctgcgggaggacagagcactgtatattgtggtcagctctatgattctgctttctgccattggtatggagtggctctataaagctttggagcagtacacttatattgcggtgcggtcgattgtcttcaaggtcatcgccatggtcggcatgtttcttttgatccaccaaaaaagcgattatgtagtttatggaagcatcaccgtatttgcatccagtgctgcaaatatcatcaatttgtttcatgcgcgaaagtacatcgattttcactcagttggttattacagcatacgccgtcatttaaaaccggtgctgatctttttcgccatgtcctgtgccacgacaatctatacgaatctcgacaacgtcatgctggggattatgacgacaaaagaacaagtcggatactacgatgcagctgtaaaggtgaaggtcattttagttagcttagttacatcgcttggcacggttctgttgccgcgcgcctcgtattacgttgagatggagatgaagggcgaattcaggcgtatcagtgcaaaggctctgaacttcgtcatgctggtggcgctgccgctgatgatctttttcatgctatttgccgagcagagcattcgtttcttgaccggcggtacactgtatgaatcggcaactctgcctatgcagatcattatgccgacgctattgtttattggcatcacaaatgtgttgggcattcaaattcttgtgccgcttgggcgtgaaaaaacagtgctcgtttccgaaatcgccggtgctgttaccgatctaatattaaatgcgattttaattccgctgtacggcgcggccggtgcggccataggtacgcttgccgccgagtttgcggtgctcgtggtgcagtatattgcgttgcgttcagaagtgcgcggtgcttttctggatatacattattttaaaatttttgcagcactcattccggctgtgctcagcgcagtttgggtcagtcatctgcaaatcggcacattctggttgctgttgcttgcagcggtattgttctttggcctctacggcatcgtcttactgttgctcaaagaaccgctcgtaaaagagattgtgttcggactgctctcaaaactcaaaagaaagaataaagcggatgacgtagcttaattgcatcatccgccgtaaaagctcggtacagattgtgccgagtttttttatcccctccccacatgcaccaaatgcgcgatgcccggtatgctctcgccctgctgcgaagaggttgtggacatcagcgcgccggtcgccataaagagaatatttttcagctctccgcgatccatgcggttcaaaatatgcccgcataatacaccggctgagcatccgcagccggagccgcccgcgtgcacgtcctgtgcctcgcggttaaatagaatcagcccgcagtcctcgtggttgcgcagaacgatcccgttttcgcgcagcagttcgtataataattttgtgccaaccgccccgaggtcgcctgtgtaaatgcggtcgtagtcctcaggctttgtcgccgtatcgttaaaaaaatccagcaaagtctgcgctgcagcgggggccatcgccgcgcccatgttcgtcatgtcggtcacaccaaggtctgtgatgcgtcccacggtcgcgtgccgcacttgaatgtcgccgctcataccgagcaccgcgctgcccgaagctgtcgccgtccactgcgcagtcggcgcgcgctggctgccgtattccagcggcgtgcggaattgccgctccgcggtgcagaagtgggaagaggtcaccgcgcaggcgtagttcgccgcgccgcattccaccatgatggaggccatgatgagcgtttgcgccatcgtggagcacgccccgtattgcccaaggaacggaatgtccattccgcgcagaccaaacgtgctcgaaatacactggttcagcagatctcccgcaaataccatgttaatgtcctgcttttgaagccccgccttgcgtatcgcaaggttcgcggcttccgtttgcagcatgctttccgctttttcccagctttcctgattcaaataagaatcgagaaacgtctggtcaaagtcgcgcgccagcgggcccgcggcttctttttttccgcacaccgccgcgtggcccaaaatcgccgggcggcgctcaaatagaagcgtgtaacgtccgagtcttttcataagccctccttaaaacagcccgatgatatacagcacgatcccgtacaaaaccgaagccgaaatgccgaacaccagtaccggccccgccaccgtgaacagcttcgcgccgaggcccgtcacaaagccctcgcttttgaattccagcgcaggggagaccattgagttcgcaaaccccgtaatcggaaccagcgtgcctgccccggcgtatttcgctatgttgtcgtatacgccgcaggctgtcagcgcggcggaaatgaaaatgagcgagattgaaacgcacgtccgcgcgtcttttaaatcgagccccagcagcatgaacgtgttcgcaagcgcctgccccagcgtgcagatggccccgccagataaaaacgcaaacaggcagtttttcagtacgggggagtgcggagaagccttctgcaccatcgcgtcatattgctgcggtgttttctttttcatacgaccaccctttctgtttaaccgggtttattgtgcgtatcgaggtaaaagatattccacatttttaagattttagttgattatctcaaacagagcgtgtataatcagttgcaggtgatattattatgtctaaactcagcatcctgaagcagaaaactaagcgcgatgtggatatgacgcagggcagcatcttccgccacctcatcacattcgcgtttccgcttctcatcggcaacattttccagcagctctacaacacggtcgatacgtgggttgtcggcaactacgtcagcaacgaggctttctcggcggtcggcacggtcggtcccgttatcaacatgctcatcggcatattcttagggctttccagcggtgccggcgtcgtcatttcacagtattatggcgcaaagcggtatgataaggtgcgcgataccgtccacacctctatcgtcatgacgctcattttggctgtgctctttacaatcatcggcatcgctatgattcccttcgtgctcgatttcatgaagaccccggcagaggtcatgccggagtcctccgcgtacctcaccatctacttcgcgggcgtcatcggtcttatgctctacaacatgggcgcgggcattctgcgtgccgtgggtgattccaagcgcccgttctatttcctcgtcgtctccgccgtgctcaacatcattctcgatctcgtcttcgtgctgtcgctcggcatgggcgttaagggtgttgcgtatgcgaccatcatctcgcagggcgtctccgccatgcttacgatgattacgctgttccgcacggattcctgcatcaaggtcgagctcaaatatttgaagctcgataaagaaatgctcgcgaagattgtgcgcgtcggcatcccggccgccatccaaatggcgatcaccgcgttctcgaacgtatttgtacagtcttatgttaactacttcggcgcagactgtatgtccggctggacggcgtacagtaagattgaccagcttctcttcctgccgatgcagtctctcgcgctcgcgtctaccacgttcgtcggccagaacctcggcatcgatcaggtcggccgcgccaagaagggcgcacgcacggcgttcctcatgtccgtcgtcgcaaccgtcattctgacaatcccgttgctcatcttcgcgccgcagctcgtctcgttcttcaacggtaaagcagaggttgtcgcatacggttccatgctgctgcgttattgctcgccgttctacgtgttctgctgcgtcaaccaggtctactccggcgtgctgcgcggtgcaggcaattcccgcgcaccgatgattatcatgctgggctcgttcgtcgtcttccgccagatttacctctttatcatggcgaacttcatctccaacaccatcattcccatcgccttaggctaccctgccggttggctcgtgtgcagcaccctcacactgctctattatcgccacgccgacctctccaagagccgtctcgtcgaagacacagagaaaaaagcagaagcttcaggaaaaagccgcataaaagctgtataaaatacagttgtataaaatacaacaaaattgcccctcgaacatcgcatgcacgtgccggtgtccgagaggcttttttcatttccgcaaaatcgtactacctttccaccttttctactcgacaaaaccaaaattttttcaaaaatccatctttagatggattacatttcgtgcgaaatatgatatattgtggttataaaccataaaaggggagtagagcacatgaatgaagtcgtcatcaagccatcgctgcgcgagcaattcttacagggttgggctcagtgccgcgtcattttcttcagcgcgccgtgcggcttcggcaagtctacagctgccaccgccttgctcggcaatcacaaaacctgcgtgttttcggcagaagacccggaattcctgcgcgagcccgtgccgaaaaatgtagatgcgattgtgatcgattccctgcccgcgctcaaagacccggaagaccagcaaacgctctgcgcatggatccgcgaaaatccggagctgcacttcgtcattttaagccgcggcgtgctgcccggctggctcatgccgttccgctttacggggtttttgcagctcatcgaggccagagatctgctgtttgaccgcgataccgtgcgtgtttttctggaaaagaatggctgcacaccaacggaagcagagatcaacgtcatcatccacgattctctcggctacccgctggccctaacggcgctttcgcgcctgatgcaaaacggtcagccctatacgccggagatcgtcggcattgtgcagcaggaaatctatcacttttttgaggataacatcttcaaccgcttttcaatgccgctgcgccgtatgctgctcgacatcgccccgttcgatacattcgacgccgagcttgcccagatgatttccggcgacagccacatcaacgagcttatttccatcgttcggcacgataccaccatgcttttaaatgccgatgcacagaaataccgcttctggagctttttccaacagttcctcatgtgggaactccgccaagtctatacgccgcaggagcaggccgcagtgtacagccgcgccgggctttactatgagctgcacgaagattacgagcatgcgctcgagtgctattcgcgctgcaaagaccaccgccgtgtctcggaaatgctcatccgcaacgcagagcagcaccccggtgtgggacattactatgagatggaaaagtattactatgctatcccgaaagaggagatcctccgctcgccatcgctcatgtgcggtatgagcatgctcacgtccctctgcatggattacgaagcctccgaaatgtggtattccgccctgcaggagtatgcagccccgctcaaaaagaccgacaccgcctacaaagaggtgcgcggcaagcttgcatatctcgatatctccctcccgcagcgcagcagcaaaggcatcgcagaaaacatcggcaactatttcaaaattctaacggataaaagcttgcaaacacccacgttttctgtcaccagcatgctgccaagtcttatgaacggcggcaaagatttctgttcgtggtccaagcacgatgaactgctctacaaaaccatccgcaagccgatggaggccattctcggcaaagacggcatcggttttgccgattgcgccctttgcgaaagcaaatttgaaaaaggggaggataaccttccgtggctcatgacgcttgtggcccagttgcccgagatcgagcgtcacggtacgccggatatgacgttcgccatcatcggtctcatggcgcgcgcccaaacaaagcagggcaacgccatcatggcgctttcttctttagacagtctgcgaacagagtttgaggaagacaacaagcgtttcctgccgaatattgatgccatgcgctgccgtatatggctgcgcaccggtgaaatggaaaaggcagagcagtggtaccgtacatctgccccccagatcacgccgcgcatccgtaccatgtggcgctaccagtatataacgcgtgccatggttgagatcgcgctcggagaagaaaataccgcgctgctcacattggcctcactcatcccgttctgtgagcgctgcggtcgcgtgatggaccgcatatatatccgcatcctaacggccgtttgctatcagcggcaaaataacgcccggtggcaggaggagtggatgcaggcgcttgatgccacccatgagtaccgcttcgttatgcctattgcgcagtttggcgccgccgtaatgcccatgctgacgtttaccggctacaaaaaggacgagcccttcttttcactccttttacaggaaacgcgccgtcaggctgttttgtacccgaatttcttgcgtcccatgccgcggctctcagaaccgctttcgcccgcagaaacgcaggtgctccggctcctgtgcggcaaccgcagcaaccaggagattgccgacatcctcggtgtcaaggtcgccaccgtcaaaacgcatgtcatccacatcctccaaaagctcggtgtcaaacgccgcggcgaagccaaagaagttgcccaaaaactccatatcatcgagttttgacacaaaaactcccgaccgccgcaaaccgcagcagtcgggagttctttttatttaaatatttaatttcagcttacttttccaaaaatcccttcagcgccgcatagtccacattctccggcttcacttcgtcaaagaacttcagcaacttctcagccagcacgcgtacaccgccgacggaattgctttcaatattcagcggtagaatggggtcgtgtacgctcatgcgcagcaggaaccagccgtcgccgtcgttttccgggaacgaaatgcggatgccttcgcggttgtccggcgcaatgttccagttgtgcgctttcgcgtagctttcaagcgccgcaatggtgctctcaccataggggcggaaatcctccgcggtaatggggaagcgcaactctttttcttccttggcttccttcagatcggcgatgagactatcgagcgatttgccctcgcggcgcagctgtgccgccttaatgatgatcttcgtcaccagataggcaccgtcgtcaaggaagtagttctcgcgcagcgccgcatggccgctcgtctcaatcgccagcgggcagttcacgccctcgttattcaggcgtaccgcttcgttgatgacattcttgtaaccgcgcttaaagcggtgatgcttgccgccgagtgtctgctcaatgtaggtcttgagtccgtcggacgtaatggagtccgtcacaatggtgccgcccgggttgccctccagcgcaatggcggaagcaatcgccacaagacggttgcggttgatctcttcgccgcggctgtccacagcgccgccgcggtctacgtccgtgtcaaaaattacgccaaggtccgcaccggccttcacggtcgccgcgcaaacgctcgccatggcctcctcattctccgggttcggaatgtggttcgggaagcggccgtccggctccaaaaactggctgcctgtaatgtccgcaccaagcggcttcagcacgtcgttcgcgtaaaaaccgcccgcgccgttgccggcgtccacaacgatcttaaagcccgcaagcgggtgcgcataatcttccgcgttcacgcccttgcggatcatctcgcgcagattatctgcatattttgacatatagtccaccggcaccagcgtgccgttgtcggtctccttcggcgcagcgccgttctgtgcatattccaaaatctcggaaatatccgggctgtcaaggccgcccgcaggcgtgaagaacttcagtccgttgcggaagaacggatggtggctcgccgtaatctgcaccgagcagtcacacggcagctccaaaaccgccatgaacatcgacggagtagaggcaaggccgcagtcgtaaaccgaagcaccgtacgtcgtaaacgcgcggaacagcgccgccgcaatacggtctgcggaaatgcgggagtcatggccgacggcaattttcagcccctcggcgcacttatccaggtgcttttcgcaccaaacgagaaaaccggccgcaatgcgctccacgacctcatcggtcaggttaatcggcgcgccgccgccttcacttgcaacaccgcgaatgtcagtgccgcttttcaaagttttataggcaaacatggaaaagacctcctgtttcattttgcattttatccaagcttattataatacaactcccgtaaaatgaaaagagctttttgatttttgacaaatacgttttagtatggctaaaatcgtctacaaactgcaagctgtaaaccgaaaaattgcaaatttcatgtaaaatcaaaaattttttcaaaaaagtgttgacaaaatgaaatattggtggtataaacttagcataataattcaagggcacagatgaagagaagtacccggcagaccgctttgcacagtgagcgggggagagtgtgaaccccgcgtaagcacaccggcgaataacacttcggagcctcaagccgaaaagatgcgtatatctcagtaggtgcgacgtgtggcggcgcgttaagccgtgcctgtcttgttagagacagtaaaggtgatcttctttataagataatttaggtggcaccgcggatacaacagctattcgtcctaagaaattgggacaaacggctgtttttttatttgcgtttggactgaaattattttatttggagggaaccgatatgtgttcgattatgggttacacagcaaaagacattcgtttggaagatttacgaaagggctttgataaaaccgtttcccgcgggccggatatgtcccgcacactggaaacgcccgcaggttggctctttttccaccgcctcgccatcatgggcctcacagaagaaggcatgcagccgtttgagctggacggttccgccgtcgtctgcaacggcgagctctacggcttccgttccgttaaagaggagctccggagaaaaggctacaccttcaaaagtgactctgactgcgaaattttactccctctctacaaagaagagggcaccgagatgttcaagaagctcgacgccgagtttgccctgattatttacgatgccgagactgatagcttcatcgctgcgcgcgaccctatcggcatccgcccgctctactacgggtacagcgaaagcggccacattgtgtttgccagcgagccgaaaaacctcgtcggcctgtgccatcgcgttatgccgttcccgccgggccactactataaggacggcaaatttacctgctactgcgacatcgccgaagtcgaagaagtttgccgcgatgacctcgagactgtctgtaaaaacatccatgataagctcgttgccggcatcgaaaagcggctcgatgccgatgccccgctcggttttcttctcagtggtgggctcgatagctccctcgtctgctccgtcgcggcaaagcttttaaagaagcccattcgcacgttcgccattggcatgagtgaagacgccatcgatttaaaatacgcccgcgaagttgccgattacattcacagcgaccacaccgaggtcatcatcacaaaggacgatgttatcgaaaatctcgaaaccgtcattgcgctgcttggcacgtatgacatcaccaccatccgcgccagcatgggcatgtacctcgtctgcaaagccattcacgagcagaccgatgtccgcgtgctgctcaccggtgaaatttccgatgagctcttcggctacaaatatacagatttcgcccccagcgccgctgcgttccaaacggaagcccaaaagcgcgtgcgggagcttcatatgtacgatgtgctccgcgccgatcgctgcatctccgccaactcgctcgaagcccgcgttccgttcggcgacctcgatttcgtcaaatacgtcatgtccgttgatcctgagatgaagctcaacaagtacaaaaaaggcaaatacctcctgcgccacgcgttcgagggcgattacctcccgctgccgattttataccgcgaaaaagccgcgttctccgatgccgtcggtcactctatggtcgattacctcaaggcctacgccgaaacaaagtataccgatgacgaaatgaagctccgcgccgcaaaatatccgttcgcaacgccgtttacgaaagaatcccttctctaccgtgaaatttttgaaaaatactatcccggtcaagcggaaatggtcaaggacttctggatgccgaacaaagcgtgggagggctgcgacgtcaacgatcccagcgcccgcgtgctcgcgaactacggtgcttccggcgaatgattggaaaggttcataaactttctcaatgtttaacaaattcactgaaaatttaacctgaatgcaacacaccttttttccgtttagcccttgtgtattttctgctgttgtgatagaataaagccatcataggatattatggttttccacatagaaccctatcggcaaaccataatgagactaaatctcatatcgaaggagagatgactgatgtccaagatgatcgaacttcacgacatcgatgttccgggcttcctgtctgtactggatagctgcgagggcaatgtgtatctgatgacgcgcgacggtgataagctgaacctgaaaagcaagctgtgtcagctcatcggccttacgtctctgatcgaaggcggaaagatcgcagaagcctttgtggtctgcgataatgaagcggatgaatccaagctgttccgctttaacctttacaaggacgaaacgcaaggtaagtaaagagtaggatttgcaaaataagctgctgcaagtaaaaactgcggcagcttttttgtatcgcgtaaaacaaattatgtaaacaaaaaggagagactcatgccacaaaaaagaaccggcgcaggccgtcgccgccaaccccggaacaaaaaaacgctttccgccgtcatcagcgccgtccttgtgctcgcggcggtgcttgtctattatttcccggagcttgaaacgtacctcaccggtgtaccgaacacagactcaagcgcccccgcacagccaacccaaagcaccggcaccgacgccgactgcgccgtctactttttagatgtcgggcagggggatagcattttaattcaaatcggtaccgattacaacatgctcattgatgccggcacccgcgaagcgggggataccatcgaaagcgacctcgaggcgctcggcgtcacatcgcttgatgctgttgtcgccacgcacccgcacgcagaccatatcggctctatgaagcagattatcgaggattacaccatcggcacgttctacatgccccttttgcccgacgaccaaacgcccaccaccgctacatacgaaaatatgctcgataccctgctcgacaaaaacgtccaaaccgagcagatctccaccgatacaaaaatctccgcgcccgaaaacgccaattttgccgtcctatccccggaaaaggacgagatattcgataacctcaacaactattccgctgttctgcgcttcacctacggcaatatctcctttatgctcaccggcgacgccgaaaccgaggttgaagagaatatcttagcacgcgaaacaaatatcaccgctaacattttaaagtgcggtcaccacggctcgtccacatcgtcctccatggattttctccgcgccgtgaaccccgctgtcgccgtcatatcctgcgggcaggataataaatacggtcacccgcaccacgaaacgctcgaaagtctttccgaacgcaactgcaagatcctgcgcaccgatacagacggcaccgtcgccgttacaacggacggcaatacgtattccgtctatacgtggtcggcggaaaacggcctttctccggcagcgtaagttcgcgtaaaaaattttgacgaaaacacaaatctatgctatactgataaaaataaattccgacccatgacggaaataaaggatggtttttatgctgacagaaagcaaaaaggcgtttatcgagttcatgatgtccgcagacgtgctgcgtttcggctccttcgtcacgaagagcggccgcaatacgccgtacttcgtcaataccggcaactataagaccggcgagcagatcgcaaagctcggcaagttctacgcatcgctcatcaaggagaccgtcggcgaagatttctccgccatgttcggcccggcgtacaagggtattccgcttgtcacagccgccgctgcgtccctctataacgagtatggcatctcgaagccctacttctttaaccgcaaggaagagaaagaccacggcgaaggcggcagcctcgtcggctacaagccgaaggacggcgataaaattattatcatcgaagacgtcatcaccgccggcaccgccgtgcgcgagaccatgccgatcctctatggctgcggcaatgtgaaagtcaacgatatgttcatctccgtcaaccgctgcgaggtaggcaaggttcccggcaaaaccgccatcatggaggtcaacgaggagttcggcatcaaggtccacgctatcgtcaccgtcgaggatatccacgagtacttaaagcagtccgaaaaatacaacgatatcctccccgccatggaagactacatggcaaaatattgcatcctgtaaaattagcaagcgcataagaacaccccggcaagccatccaaactgcctgccggggtattttcatattatctcgactaattaagctcttttaccgtctcgcaccctgcttggctgttctgtgcggcggcgcgttctgcgggcggcgtggcggtctttgtgcgctgcctcacgccgctttctgcggtgattctggaagaacctgctttgcagcaaacgccgcgtgtggcgctctgcaaaatgctccataaaatggtttgtctgcatcataaagacgatcgacacaatgagcagcgggatcaaaataaacagcatcggggcggtcagcggcaccatggaaaccaggtccatgcagccgatgtatcccacaaagaacgccgccaccatcgtgccgaacagcgccccgcgcagcgcgttgaacggcaggcaaagcttgaacatcagcataaacccaacggcaaacgccacaatgaccgaaagtgtcgagacctgcgggttcgtcaaattcagcggccccttaaacagcgtcaaaaacaaaacgccaagaatcatcgtcagggcagaggggaacgatttcttcaaaacgttcgctaaaaagctgccgcttatacgctcgttgttcggctccagcgccagaataaacgatggaataccgatcgtaatcgaactgataaacgtcagctgaatcggctcaaacgggtaggaagcagaaagaaaaatgaacagcacacccagcaccgtcgaatagatcgtcttctgtaaaaacagcgatgcagagcgttgcaaattgttgatggagcgcctgccttcctttaccacctgcggcatggaagcaaagttggagtcgagcaaaacgaggttcgagaccgtgcgcgccgcgtcgctgccggaagccatcgcaatgctgcaatcggcctctttcagcgccagaacgtcgttcacaccgtcgcccgtcatcgccaccgtgtggccgtggtcttttaacgcctgcacaaatttcagtttctgctgcggcgtcacgcggccaaacacactgtattgctcaattgcccccgcaatctcctcgtcggtgtgcagcgttgtcgcatcgcagtagttttccgcgtggggcaggccggccttctgtgcaatgttagagaccgtcacggcgttgtcaccggagatgaccttcagcgtcacgccctgctctgcaaaatagcgcagcgtttgcggtgcttccgtgcggatcttatcactgattaaaatgaagcccaccggctcaatgtcgtccggcagcaccttgttttcaaggaaaggctttgcggagtgcgccagcagcaaaacgcgttcgccgcgcgccgcatattcctccgtgtgttcacgcagcgcaccgaagcgttcgcccaaaatgaattcgcccgcgcccatcacatacgtgccgcgctcgccgaaatacgcgccgctccacttcctcgcagaggagaacggcaccgtcgccgcagctttccagtccgatccgccgggaaagtatgctttcaccgcgttgtacgtcgggttgtcgtccgtcaaaacctgcacaagcgccttcagcggagccgtcatgtcctcttcggtgtagcccgtcagcgggtgcagctcgtccacctgcatcgtgccctcggtgatcgtacctgttttgtctaagcatagcacatctacgcgtgccaacgattcggtgcagtacaggtcctgcaccaacgtcttgtagcgtgaaagccgcagtacgctcacggcaaacaccacgcttgtcagcaaaatgagcccctccgggatcataccgaggatcgcggcgaccgtgctcacaacggcttcgcggatcgtgtcatgcagcaaaaaaaactgcttgcagaaaagcaaaatgccaatcggcaccagcgtaaagccgagcgtctttacaatgaaatcgagggaatggagaatttcggagttcgtgcgcttcacatacttcgcgccgtttgcgatgcggtttgcgtagttttcgcggcctacgtgctccacttcggcgtaacagctgccggaaacgatgaagctgccggaaagcagttcgtcacctgcgcgcttcaagaccggatcgctttcgcccgtgatgagcgattcattcacttccgcttcgccctccaaaacgatggcgtcggcgcagatctgctgcccggtcgaaaggtgcagcacatcgttcatcacaatcccgctcacgggtatcgtctgcagttttccgtcgcgcagcacagaagccttcggtgcggaaatgagggagagcttgtcaatcgtccgtttcgctcttatgccctgaaacgaaccgataataatattagaaaagataacgcccaaaaataaaaggttcttaaacgaacccaccagcaaaacgaacagcgccagtacaaagttcaaaatgttaaaaaatgtgaacgtgttttctaaaatgatctgcttttcggttttggtcttaatgccctcgtcggcgtttgaaagcccgtcgcgcacgcgctgcgctacctgctccgaagaaagcccctgtctacggtctaagctatccatcccgttacgatctcctttttcttatctagatataagaatacacgatacaccacccgaatgcaaggatataaaacgtaaatttctcttacgattttgtgaattctttccttttgcttgtagaatatccgcaaaaaacaaattaacattttatggaaaaagtcaattcaattttcaagtctatcctgaaatctatccgaatttttgacacttttcacgatagagagataaaaacccgtcaaaatctgctgtaaacagcaaaattctcattgtaaaacccgcagataaaagcccttgcggccgatttgactttgcaggaatttatgattatacttaattatcgtacatagaaaatcagaaaatgatatgcgaaaagcataggtttattcataaaggagagatcattcatggcagaaaagacagaaaagaaatacgttatcacaaaccatagaagcggtaaggttctcgcttcctgcggcggctctgccgtgcagatgaccgcaaacggcggcgaaacgcaggtctggtgtgccgtcccggcagaaggcacgtccgtgcagctcgtccataaggtcagcggtctcgcgctcaccgttccgggtgaggcagaaaacggcaccgcacttgttctcgcagaggcacagggcaacgcttcccagctctggaagctgaccactaccgtcaagggctgccgccgcatcacgcatgtcgcgtccggcaaggtcatcgacatcaaggacatcagcgatgcagacggcgcaccggcacagctttgggagttcgtgaagggcgataaccagaactgggtgctcaccgaggtcgaaaaggaaaagaaagccccggcaaagtgcgccgcaaaaaccgcaaagccggctgcaaaagagaaagctaaggcagaggtgaaagccgaagcaaagtcggaagtcaaggcagaagttaaagccgaagccaagcccgccgccaaaaccacaaaggcagccgcaaaaaccaccaaaaccgcaaagaaaacgaagtaagttcgtttagccgagagccgcacccaaaccgggcagcggctttcttttttacccaacattattctaaaaagcgtgatcatacccaaattttcacaaaatcgccttgcaccgcccgtcaacagctgatatactaaagacagtatggtttatcctgcaattttgcggccaaaggagttgtctttatgatacatgaaaaaatcaaactgcacgtgccgggctctgcggattacgcagccatgtatacgtattttctggatctttcaaaagaggttcccatcgaaaagcgtcccaccgtcatcgtctgcccgggcggcgcgtacgcctttacgtccgaccgtgaagccgagcccatcgccatgcgcttcaatgccatcggcatgaacgccgttgtcgtgcgctattccgttgccccggcgcgctttccgactgcccttctggaagtcgccactgccgtgaaatacgtccgcgaagaaggcgtaaagtacggctgtgaccccgaaaaggttttcaccatcggtttttccgccggcggccatttagccgcaagctacggcaatttctggaaccgcccgttcgttgcggaggctatgaactgcccgtccgagcttctgcgcccgaacggccagatcctctcctatccggtcatcacgtccggcccgttcgcccaccacgattccatcaagaaccttctcggtgagcagtacgagctcgaaaaagcgaatcagtcgctcgaaaacttcgtcacgaaagataccccgcccacgttcgtctggcacacccagccggatgactgcgtcccggtcgaaaacgccctgatgctcgtcagcgccttgcagaaaaacggcatcaaaacggagttccacatgttcccggagggcggccacggcctgtcgctttgcaacgaagtcacctcgaacagcgatgcccagctcctgccgcacgtcggcaagtggttcgacctcgcagcggagtttttgcagagcctttaatcaccgattttccgtaatcgcgaacgaataaagtctttgattgaccttttctaaaaggcttcgccttttcgggagaccccctaattgggtctcccacgggcggaacgtccactggaagttccgccctcccgtcctgattttatgaacgcaaaaagatttcgtcgtctgcggacgacgaccaaaggtttcacctttggaaacggacaaactttctcgaagaaagtttgaacaaagacttttaaccctcgcttaccgacaactactatttatatttcacacccgaaaggaatcatcccatgaaagccattgatttggaagtcaagcgcatctgcgaggaaaagctcgcaaatgacgcgaagctctcggagctctttaaaaattgctaccccaacaccatggataccaccgtcaaaatcatcggcgaaaaagataccttcgtcatcaccggcgatatccccgccatgtggctgcgtgattccaccgcgcaggttcgccactatctgcccgtcgcaaagcacgacgcagaggttgccgattgcattgagggcctcgtgaaccgccagttcaagtgcattgatatcgacccctacgcaaacgcgttcaatcaggaagcgaacggcatgtgttggccaaaatacgctgcggaaacgctcggtcagaccgccggcggcgagtccgacgataccgatttcgagaccccgtgggtctgggagcgcaagtatgagattgattcgctctgctacccggtgcagctcgcgtaccttctctggaaagagaccggccgcacgggccagttcaacgaccagtacaaaaagagcaccctgcgcatcctcgaccttttcactgtcgagcaggatcacagcaagtccccgtactatttccgccgcaccaactgcccgcccaccgatacccttacgcacgacggccacggcgcgccggtcgccgttacgggcatgacctggtccggcttccgtcccagcgacgacgcctgcgtctacggctatctcatcccgtccaacatgttcgccgtcgtaaccctcggctataccgcggagatcatgcgtgagatctataaggacgaggaagtcgccgcccgtgccgaaaagctcgcgtccgagatccgcgccggcatcgaaaaatacggcgtcgtcgagcacccgaagttcggcaaaatgtacgcctatgagaccgacggccttggtaactacgtcttcatggatgacgccaacgtcccgagcctcatgtccatcccgtacctcggctactgcagcgccgacgacgaaatttataaaaacacccgtgcctttgttttgagcaaagaaaacccgtattattacgagggcaccgcggccaagggtgtcggcagcccgcacaccccgccggagtacatctggcatatcgcactttccatgcagggactcacaagtcgtgacccggaggaatgcaaagcgcttctccacatgttaaaaacgaccgatgacggcaagggcttcatgcacgagggtttccataaggacgacccctctaagttcacgcgcccgtggttcgcatggtcaaactccctgttcagcgaatttgtcttaaagtgcattgatgaaaatattctgtaattaaggagctgtttttcatggcagatttttacgcactcggtgaacttctgatcgattttacccccgcaggcaaaacgccggccggcatcccgatttttgagcagaatcccggcggcgcaccggcaaacgtcgccgtgcaggccgcgcgcctcggtgtatccgcaggcttcatcggcaaggtggggcaggacatgttcggcacgttcctgcgcgatacgctcgttaagcaaaatgtcgatgtcgaaaacctccatttctcaaacgataccgcaacgtcgctcgcgttcgtgcagctgtccgaatccggtgaccgcgatttcagcttttaccgtaaccccggcgccgatacgcaaatcacgttcgatgaggtcaataaggacgcgctcgcaaacgccaaggtgctgtgcttcggctcgctcctgctcaccgcagaacccggtcgcacggctgtgccgcagattgtttcctacgcccgcgagcacggtgctatcaccgcctacgacccgaactggcgcgcaccgctgtggccaaatgccgaagccggcatccacgccatgaagagtctgctgccgcttgccgatgtcgtcaaagcgtccgatgaggaactcgaaatgctcaccggctgcaccgagatcgaagcgggcgcaagggagttctttaagctcggcgtgcaggcggcggtcatcacgcgcggcgcaaagggctgcgtcgtctgcaccccgaaaaccaccttaacgctcaacacctacgatacaaaagtcgtcgataccaccggctccggcgacagcttcttcggcgcgttcctcacaaagctcatggagaccggcaagcccgtttccgagatcaacgaagccgagctgcgcgacgctgccgattttgcaaacgccgcaggctccgtctgcgcgacgaaaaaaggtgcgattcctgcgctcgccgaccgcgaattgatcgaaacgtgcagagcgtctatcccgcttttaaagctgtaagccatttcccgcaaaatccgctttgcacggctgcggcaaggtcgtattagaggggcacatcaagcacggcgtgcgcgacagcatcgagcacggcgacgcagataaaaccatcgaaaacttcacaaaagctgtggaacgcttctccaatatgggctgatcccggctgaaaatcaaacaaaacagcgaagtgcatggggatacccacagcacctcgctgtttttaggttctcttgtattccgtctttttcagtttcctttttcggcttaggcaaagcttaatagtcaaaaactatcgtgcggcagtcttcgcagatattcgcctgtatccgcacgcggtggcttggctttaacggcgtgatctccacaaagccgtcggtgtttttggcgttttcaaatacgccgggcacggtgttcgcaaagctgaacgcgccgtccttgcttgtaaacaagtatccctcgcgcatcgcttttccgcatttcgggcaattcatagaattcttctcctctctgaatgtataacaattttgcggaagcaaaccttacggctcggcagggtgttggctcatctcgagcgctttctgcatttttcgctcaaagtcttctgctttcacaagggcaatgccttcaccctcgtcaccgagcacgatcagtcggtcgccctcctttaagtcaaacatttcccgcgccgccttcggtatgacgatctgcccgcgcgcgccgagcgtcaccgcgccccaaaggtgcttgcccgcaggggcaggggcgagggccgtgtggcccactcggttttggtcgtgcaaaagcgcgtccagcgtcacgccgtagtgccttgcaaggcggtcgcatttttcaatgtccggcacggtttcgccctgctcccacttggagtaggactgccgcgtcaccccggcgatttccgccgcctgctcctgcgtcagccccttaaggccgcgcagcaaaatgagattatcggcgagcataagctccacttcctttctgcattcagtatatcgctgcgcagtgaaattttccaccaaacaaacgatacatatttttcgatttcatgttaagttaaactgccttgagggcataaattgtgcccgaagctttggcttcctgacgccaaagcacgggtcacctgcttgcataagaccccatgatgcacgttcagagatccagacgcgccgatgctgaaacaggccgatatcggcattgcgatgggcagtgtgggtatggtcgttataatcgtgaagctcgttttggatataaggaacggctaatcgcatctctttctgaataaaaccacaagataacttgcagaaaatgcagactacttttgtttatatgcgcctaaaattaaacaacatatcttgattttgtggcaaaaacacgctatactggaagcgatataaagaaaagagggcgtggaaaatgaaacggaaattggagagcatggaagaccttttgcaagcggtggaatactacggttttctgccgttttttccgaatgacattccgggcttttcggtggaggagatgtgcgcgccggcgtattggttcgctgaagaccgcgacggaccttgggagtggaaaggcccggcggcgcagacgaagcgctgcgcgtacggcaagcttttccggaaaaaagcggggtttgtcagccgggaatggctgccggagcttgtaaatttccgccgtgacggctatgattttgacgcgcgctgcgatgacggactggtgtttcacaaggacgaggagctgtataacacagtccatgcggagggcgaaattctctcaaaattcctcaaaaagaagctcgattaccgcaaaggcggcaacacgggctttgaaacgtgcatcacgcggctgcaaatgcagacgtatttgtgcgtttcggattttatccgcctgaaggataaaaacggcaggccctacggttgggcggtggcgcagtacacgacgccggagcatttattcgggtacgattatgtgacgtctgcatataagagcgaaccgaaggtctccgaagaaaaaatgattgcacaccttaaaaacctgcttccggcgacggaagtgcagatacaaaaattactaaagtagttgggaggaaagcgtatgcttcaacaagttatgacagagccgggcaagatcatttttcgggaaattcccgtgccggaaatcggggacgggcaggtgctggtgaaaattatggacatcggcgtttgcggctcggacatccacgtgtaccacggcaagcatccgttcacgaaataccccgtgacgcaggggcatgaggtctcgggtgaaattgtaaagtgcggtgcgaatgtcgaagggcttaccgtcgggcagaaagtaacgattgagccgcaggtgtactgcggcaagtgctatccgtgccgacacggcaagtacaacctgtgcgaggagctgaaagtcatgggcttccagacgacgggcacggcttccgaattttttgcggtggacgcaaagaaagtgacaccaatccctaaaagcatgagctttgaagagggcgcgatgctggagccgcttgcggtggcagtgcacgccgtgcggcagatgggcgacgtgaccggcatgaacattgcggtgctcggtgcggggacgatcggcaaccttgtggcgcaggcggcaaaaggtcttggcgcggcgaaggtgatgattaccgacgtgagcgactaccgtttggagaaagccaaggaatgcggcgtagacgtttgcgtgaacacgaaggggaagaacttcggcgaggcgctcattgaagcatttggcccggacaaggcggacgtcatttatgactgcgcgggcaacaacgtgacgatggggcaggccattcagtatgcgcgcaagggtagcgtgattgtgcttgtggcagtgtttgccgatatggcgaatgttgatctggctgtggcgaacgaccacgagcttgacattaagagcacgatgatgtaccgccacgaggactacgtgggcgcgatagagctggtggaagcgggcaaagtgcagttaaagccgcttatctcgaaaattttcccgtttgcgcagtaccttgacgcgtataaatacattgacgcgaaccgcgagacgacgatgaaggtcatcattgccgtgcaggaaaaataaacggaaaaagaccgggaaacacgcgctgtgcttcccggtcgattttatgtcgtggtttttactcagccttcaaaccgctttgcggcatcttcgagctcttcgatgatgtggatgtgctgcgggcagtgcgcttcgcaggaaccgcaatggagacattcgcttgccttgccgccctcgcgtgttgcagattcgtagccgctgcgatcgacattattctcggagccgaactgcttctggtggtttacggcgcggaaaatgtccgggatgtgaatctgcatgggacagtcgtctacgcagtaccggcagccggtgcatggaatagtgggaatggcgttgagtttttcgacgacggttttcagcacctcgtgctccttgtcactgagcggctcaaagtgctccatgtaggagacgttatcgtcaagctgcgctttggtgctcataccggagagcacggtgaggatgttatcgagacctgcgcagaaacggacagcccaagacgggatggaaagctcaggattctgtgccttcatgatgccctgaatttcgttgttcatgcttgcgagggaaccgcccttgaccggctccataacgatgatgggtttattgtgcttgacggcgacctcgtagcactttctggactgcacgttatcgttttcccagtcgatgtagttgagctggagttggacgaattcgacttccgggtgcttggtgagcgcttcgtcgagcacttccgcgctgtcgtggaacgagaatccgcagtgcttgattttgccctgtgctttcatcttgaaaaggaagtcccacgcgccgatgcggtcggctttctcgaacttcgctttgtccatggagtgcagcaggtagtaatcgaaatactcgacgcctgcgcgttccatagattcatcgaaaatgcgctgcatgtcggcttccgtctctatgttgtcccaaaggggtagctttgtagcgagcgtgaagctgtcacgcgggtagcgcttcacaatggcttcgcgcgctgcgacctcacttttgccgttgatgtatacgtatgcggtgtcaaaatacgtaaagccttttgccatgaaagtatcgaccatggctttcgtctgctccatatcgatctcgtcgccgatcatcggcagacgcatgagaccgaaaccgagctttggggtcgtatcgccaagataaccagtgttcattttgaattcctcccgagaatagttgtgccgtttcgtacaacacattaaagtttactgcaagtttgattatatcataaaacacagaaattgcaagaagttttttcgaaaatgcaaacactttttacataaagtgtgcaaaagataaacaaacttgcagcgcttgacggtattctgcttttgcagtacaatagaaatgttaagtttaaaaggagagcgagatatgagcggggagagacaaagacggattaagcgggctttggcagcggttttcggtgctgcggctgtgcttgtcgttttgtatattcttcgtccgccgtgcctcgtccgcaaggttttcggcgtgctatgtccttcctgcggaacgacgcggatgatcgcagcgcttttgcaattggactttgccggtgcgtgggcgctgaacccctttatgctgttctttttgccgtttgcgctcctttggggcgttttggaagcggtgcggtatgcaaagagcaaaccgccgctgctttttaagcgcttttctattgtgctgtgggcggcgtggtttctctcggcgctcattttcggcgtatggcgcaacttcgcttaatttccttgacaaagcgacgcttcgtgtgtaaaatcaaagcatagtaaaaccgtatgcttttagttcttttgcggagggatgcaaagcgaacgccttatccacgcaacggcgagccatggctatttgctgacggtggacattgcgcccgagcacgagatggaaaaggtgctgtacgccgtggacgagctgacggggctcatcggcgcggtggcgctgatgcgtccgtcgaaaagcacgctcgacttggagcttaaatccgtaaagaaaaaatacaaggcgctcaactttgccgcgggctgctcccgtgaggtcattcagcgcggtgcagatatgctgggacggacgctcgacgacctcatttccgacacgatccttgcgatgcgcacgctggaaaagccgcaggcggagtgagcgacaccgaataaagaaaggcggaatttcatgaccgcaaatgaaattaacgctttggtcgaccgtctgcgcgagcagcgtaacctcagcgatgcggaatttaaaacgattttggagacggacgcctatgatgcggcgctgcaaaaggccgcggacgaggtgcgtcgcgcgcactacggcacggacgtgtacgtgcgcggactcattgagtttacgaattactgcaaaaataactgttactattgtggcatccgtcgggataaccgaaacgcgacgcgttaccgtttaacgaaagaggagattctctcctgctgcgcggaggggtacgacctcggctttcgcacgttcgttttgcagggcggcgaggacccgttctacacagatgacctcatctgcgagattgtcgcggccatccatgcgcagcacccggactgcgccattacgctttccatcggcgaaaagagccgcgaaagctaccagaagtattttgatgcgggcgcaaaccgctatcttttgcgtcacgagacggccgaccccgagcattacggcaagctgcacccgaatgaattgagcgctttgcaccggcaagcatgtctttttgatctaaaggacatcgggtaccaggtaggttccggctttatggtgggctcgccgtatcagacgacggagaatcttatttctgacctgcgctttttgcagaagttgcagccggacatgatcggcatcgggccgtatatcacgcacgcgcagacgccgtttgcaaacgaaaagagcggctcgctcgagctgacactgcggcttctctcaatattgcgtttgttgtttccgtatgcgcttttgccgtctacgacggcacttggcaccattcacccgcaagggcgtgaactggggctgaaggcgggcggaaacgttgtgatgccgaacctttcgccggtgcgcgtgcgaaagctttatgagctgtacgagaacaagatctgtacaggggaagaggccgcgcagtgccgcgggtgtctggagcagcgcgtgaagtcggcgggctatgagatcgtcaccgcgcgcggcgatgtgaaacgataacgaaagggttttaccgaaactatgtgtaaaaaagcgatcatagccatgagcggcggcgtggattccagtgtggcggcgctgcttatgaaagaaaagggctacacctgcatgggcgcgaccatgaagctgtaccagaatgaggacgtcggtttgcgccgcgagcatacctgctgttcgcttgatgatgtagaggacgcgcgcagtgtggcgtatgcgcttgacatgccgtactatgtgtttaattttgccgaccgcttcaaaacggatgttatcgacaagtttgtgcactcttatgaaacgggtgtgacgccgaacccgtgcatcgattgcaaccgctatttgaagtttgataagctgtttcagcgcatggttgagctgaattatgattatgttgtcacggggcattacgcgcaaattgattttgacgaaaatacggggcggtatctcctgaaaaaggccgttgaccacaacaaagaccagagctatgtgctgtggtcgctgacgcaggagcagctaaagcacgtgcagttcccgctcggcggcatggagaagtgtgaagtgcgcgcgcttgcggaggcgcacaattttatcaatgcgcgtaagcacgacagtcaggacatctgctttgtgcagaacggctcatatgccgatttcatcgagcagtacacgggcaaaacgtacccgcccggggattttgtggacacagatggcaacgtgctggggcaacaccgcggcgtgatccgctacacgatcggccagcgcaagggtctggggctcgcactgccggcaccgctgtatgtgaaatcggtggatattgaaaagaacaccgtgacgctaagcccggaaagcgaacttttcaaaaaggagctcacagcgagcggcattaatttgatttccgtcgcggaaatcaaggagccgatgcacattaaggcgaaggtgcgctaccgccagcccgagcagtgggcgaccgtgacgcagacaggaccggacagcctgaaggtcgtctttgacgagccgcagcgcgccatcacctgcgggcagtccgtcgtgctgtacgacggcgaccgcgttttgggcggcgggacgattgattcggtgaaataaaaaagcctgaacaagcgctgcttgggtattgttttgtggggaggaaaactcaaatgaatgatgcgaagaagcttttggcggatatgaaagcgctgggaatcaaagagggtgagacgattttggtgcacgcatcgatgaaggcgttggggacaaaggagacgccggagacggtgctcgacacgttgcaggcggcgcttggcgacgacggcacgcttttgctgcctgcgctgacgtatgagaacgtcacgccggagcacccggtgtttgacgcggacaaaaccgtgccgtgcatcgggcttttgccgcgcacgttctggagaatgccgggcgtggtgcgcagcgtgcacccgacgcactccgtttgtgtgcgcggcaagcgtgctgcggagctgacagcattgcatggagaggacatcaccccggtggggaagaactcgccgtttatgaagctgccggagatcggcggacggctgctgtttatcggcgaggtgcttgactgctgcacgtttatgcacggcgtggaggagcgcttcggcacggactacgtcttgacgaaggagaagatccgctacgttgtgaacggcgaggaaaagtacatgtacggccacgattttaagggcttggagacgacgtaccgccgcgtgaaggagattctggaccccgcgaaaaatgagatcgtcacagggaagatcggcgacgcggcgtgctacctcatcgacgcgaaagcgcttttgaagcgcgcggaggaaaagctgcgggagaaccaacactggtttgtggtgccgcgggagtaaaaccaaacaggcataaagaaacgacccgagacggagaaaaaattccgtttgcgggtcgtttttgggtgttgtgaaatttgaaaactcagcctaagtcgatggagcgctgggcgcaggcgttcagcttcatgccggcggtatggccggcgagatattcgtagtaggcctgtgcgccgaccatggcggcgttgtcgccggtgagagagaggtcgggcatatagagcgtgcggccggtacgcttgcattcttccgtgaggcggcggcgcaggagcgcgtttgcggagacgccacccgcgatgacgagctttttatggccggtctcgtctgcggcgtgcagaaagttgcgcacgaggcaatcgacaacggccttgcggtaagaggcggaaagatcggcgatgttgacggtctggcccttttgctcggcattatgcagaatgttgatgacggcggtcttgaggccggagaagctgaaatcgagcggggcgccgtctacggtcgggcgcgggagcttgaacgctttgtcgttgccggtctcagcgagtttatccatggcgatgccgccgggatagggcatgcccatggcgcgcgcagccttatcgaacgcttcgcccgcggcatcgtcacgcgtttttccgaggatgcggagctttgtgtagtccgtcacttcgatgatgtgcgtgtggccgccggagacgacaaggcacaggaacggaggctcgagttccgggttcgtgatgtagtttgacgcgatgtggctgcgcaggtggtgcaccgggatgagcggtaaatttgcagaaagagagaggcctttcgcgaaatttacgccgacgagcagcgcaccgatgagccccggcgcgtaggtgacgccgatggcatcgaggtcgtctacggtgagctcggcgcgctcgagtgcttcacgcacgacgcctacgatagcttcgctgtggcggcgcgaggcgatctccggcacgacaccgccgtataacttgtgttcttctacctgcgttgcgacgacgctggaaagcacgcggcggccgttttctacaacggctgcggcggtctcatcgcaggagctttcaatggctaaaattttcatttttctatcctttggtctttgatttgcggggtgaaccgcggaaatattcggctcagtcgagaccgatgagcagttctttgagcgcatcggaaacaggcgcgccgtattcgctcacctgccagctttcggcaaagcgaacggtttttgcaaattctgcgccgtactggcgggtgaggcacgcgagcacgtcctcgtccacgtcgccgcggtcccagttgaacgtactgcgcaggtactctacgcgctcctcgtgcgttttaccggcgagatccacgtggtcatctgcccacggaagccaatcgagaaactgggaggcgtggcagcactcgacgtgaaacagcgtttcgcggtcgtcatccgccgggcgggcgaaatcggagcggaacggtttggggtcggtgaagccgtctgcccagtaaagaatggtcggcgttttgcgcagcacgggggtatccgggcaaatagcgggcacgcccatgagatacgagcaatcctgcacgagctggcccgtagcgcggtggtcggggtgataatcgcacgcgcggttcgtgaagatgacgtccggcttaaaattgcggatggtgcgcatgagcgtttcgcgcgcttcgagcgacggggtcaggcggccgtcgtcgaacggcagaatttcataggtggcgccgaggtaggcagcgcttttttgtgcttctgccacgcgcgttttgatgagttcttcgccgcgcatggtctggtggcctgcgttgccggtcgtcatggagacaaagcggacaatgcagccctttgaaaccaagcgctttgtgatgccgcaggtgcagatatcgacatcgtccgggtgtgcgccgatcatcatggcgcgtaaaggttctgacataataagccctcccaagagaaaatgagatcaatacaaccgccgcggctgttccgcgacttttctcatttattttagcacaaggcaggcgcgaaaacaagcccgcacaacgtgcaaagcgaggaaaatgcgcggggatgaaaattttctctttactttttgaaaaccgtgtgctatactccgttttaacaagcgatgaagagtgacagtagggatccgggaatggcacagagagccccgtaagctgcgatggggtgcaggaacggatcaccgaacaaagccttggagctgcataccgactgcgtttttgcgctgagactatgccgggcgtgcccgttacagcacaggagtatcgatgttttccgtacttttcctgcggcgaagtctgtacttgcaaaggcgtgcgtcgtgaggcgcgggcaaactaaggtggtaccacgggttattgtatcccgtccttggaaactgaaccgcaccagattatgcggacagcactaaaagcccccatgtaggatattgagttttaagcggagtggcgcagcgacagcggtgccactcccgtttttgtttggatgcgttcgtggttatagaagtaaatatacctgtcgatcagttcgtttgcttcttggaacgtctttggcttgtggcggtagatgcactctgttttcagaatggagaagaaattttctgccatggcattgtcataaggatttcctttccttgacatggacggcgttatgccgtaagattgtgttagcttgaagtatgcttgcgatgtgtattgaaagccttggtcgctgtggagctgcaactccgcagcgactttctctttcttcattgccagacgaatcgtgtccagaacaagattcacagtctgccgacttgcagtcttgtaggccacaatactgttgtcatacagatctcggatcatggacagatataaaatgccttcttttgtgtggatgtaagaaatgtccgtgacccatttctcgtttggcctgaccgcccggaactgtctgttcaacagattttcgtatttgtgtacctgctgaccaagatttacccattggcggcgtcggcgaacctcagacaataatccatattttttcatgattctgagcacagtcttcggatctctttgaatatttctgccttttaaccacttccatacacgtcgatagccataggtcttatctgtcctgcgctgacattcctcgatttcctttgccacaacagcatcgcgatccgtctctcccagacgctttttaaagcagtagtaaccacttctggataccccgaagaatttgcacataacagatattgggtattctccccggtgacggtgaatgacggcgtactttgcctttggcctcacttcctttctgtggactgcagaaaatcctgcagtaatttcacttccatcttgagccgcttattctcatacttatattcctgcagcgtctttgcaggcttcctgccacgaaacttcggcgcacccttggcggcttttttgcgttgccgcttcagcagattgtgaaccggacggtctccctccaagccaagttccgcttcgatttccctgtggttcttccctgattctaacatcttttctatggtcggtagtagaacctgcatattggtgtatcttcgtttgctcataatgaatcccccctgatgtacttattatcctacatcaggggggattttgtctattgtcctgttttactggttctgttcaaaagtgaacgggattttttacgctctaaatttcccgcccgatgaaaataacagcacgaaagggtgtagaaaatgagcgaaaacacgttattggaagcaagaaaggcaaagtttcattatgtacgggagcacgtgaacccgtacccggagcgctatgcgcaaacgcatgagctgtgcgaggcggcaaagctgccggacggggtgcaggacgtgtgcgttgcagggcgtgtgacagccattcgacgcatggggaagctctcgtttgtgacgctctccgatatggagggcaagctgcaaattgccgtgatgcgcgacgaagtgggcgaggacacgtatgactttttcaagaggggctttgacgtaggcgactttatgggcgcggagggcgagatgttcacgacaaaggtgggcgaaaagacgctgcgcgcgaagtgcatcacgtttttaggcaaggcgttccgtccgctgccggagaagttccacagtattcaggacacagagctttgttggcgcaggcggtacctcgatttgtgcatgaacggggaaacgcgcaggcggttccttttcaagtcgcagcttgtgcgggagattcggcggtatttggaggacaacggctacatcgaaattgaaacgccggtgctcatcgatcatccgtccggcgcgacggcgcggccgtttgttgcgcaccacaatgcgcttgacatggacgtttatctgcgcattgcgccggagacgtatttgaagcgtgccattgtgggtgggtttacgaaggtgtttgagtttgcgcggtgctttcggaatgaaggcatggacacgacgcatttgcaggattttacgatgctggagggctactgcgcgtactataactaccgcgacaacatgcgctttttgcaggacatgctgcaaacggtcatcacgaagattcggggcagcgcggtcatctccattaacggcaccgagatcgatttcggcgcggaatgggcggtggtgacgttccgcgagctcattttaaaggactgcggcattgacattgacgagtttaagacggcggaggctttattgcaggaaattgaaagccgacacattgaattaaactccaccgacgacccgaagaagcttgggcgcggaaacctcatcgatttattatacaagaaggtgagccgcccgaagatgatcgcgccgacgtttctcattgcgcacccgacggacttgtcgccgctggcgcgcgcgaacgacgatgacccggagatcacagaccgctttcagcttgtcatcaacggcgcggagatcatcaacgcgtactcggagcttgtggaccccaatgagcagcgccgcagactgcaaattcaggcgcagagccacgcggacggcgacgaggaagctatggtgatggatgacgactatttgacggcgatggaatacggcatgccgcctatttccggctggggcatgggcattgaccgcgttttgcaggttttgctcggcacgaggaatatccgcgacacggtgatgttcccactgatgcggccggaaccgtaagcggaaaaaacagcgaaattctgcattttcaaattgcgtttcctgcatttttatgctatactttaacggtatatccatgaaaatacgaaaccgatacagaaagtgatgacttatgagaatttccgatattttgaagaccaacaaggtgacggtctcttgcgagatgttcccgccgaagccgggcaaaccattggaaaacacacagcaggtggtgcatgagatcgcggcatataagccctcttttatgagcgtgacctacggcgcgggcggctccaactccaaaaacacactgtccattgcagaagaggtgcagaaaagcggcgttacggcgctggcacatttgacgtgtgtggggcaggacgaagagaacctcagagcgtccatcaatgcgtttaaggcgagcggcattgagaatattctggcgttgcgcggcgatattccggagggtgatacggcgccgcagacgttcccgcacgcgagcgacctcatcaatgccattcgccgcgagggtgcggatttctgcatcggcggcgcatgttacccggagggacacccggaatcgtacaacagcgacgcggacattgacggcgtgcgccgcaaggtggaaagcggctgcgagtttttaacgacgcagatgttctttgacaacaatattctttataattatatgttcaagctcctgcgccacgacattcgcgtgccggtcattgcgggcattatgccggtgacgaacgcgaagcagatcaagcgcattatgagcctttcgagttcttctatgccgacgcgctttaaggcgatcgtcgatcgttttgcgaacaacccggaggcgatgaagcaggcgggcattgcgtatgcgaccgagcagatcatcgacctcatcgcgaatgacgtgacgcatattcatatctacacgatgaaccgcccggacattgcgggcagcatcatgacgaacctttcaaagatcattgacggctatgaagctgaatgagaaagaggcgctgcgctaccttggctttcgcgggaagccggccgatgcggacaccgatgagatgattcgcgagatcggcggcgagatgctgcgcacgctcacaccgaaatgcgtatataaaagatacgacataaaagtacttgagaacgcggtggagctggacggctggcgcatcgagagcataaagctttcgcgccatttacgcggctgcaaggcagcgtatttgtttgcggcgacgctgggtttgcaggccgatatgatgatacggcggttatccgcgctcaatatggcgcgcggcacggtggcgcattccgttgcgaatgcgctcattgaagactactgtgacgaaatgcaggcgcagatcgcggaaaaggaagccgcaacgggcttgtttttgaagccgcgctattcgccggggtacggcgactttgcgctcgaaaaccaaaaagagatctttgcgcggctggaatgtgcaaagcgcattgggctgacgctgacggacaccatgctgatggtgccgtttaaatccgtgacggcggtcatcggcgtgacggacgcgccgacatgcacatacgtaaagtgccgcggctgcgcgaacaccgactgcgagttccgcgaaatctgacgcgcagagaaagggagaaaatttatgcatcctgttatagaacgattcggaaaatctgttgtcattgtggacggcggcatgggcacacttttgcaggcgaacggccttatgggcggcgagctgccggagctttggaacctgacacaccccgaggtgcttttgaaaattcagtccgactacgtgaacgcgggctgcgatattttgacggcgaacatgttcggcgcgaaccgtttaaaactggaaaagactggccacaccgtgcaggaggtcgtctcacaggcgttgaagcttgcacacagggcgagcggcggcaaggcggcggtggcgctcgacatcggcccctccggcaagcttttgaagccgttcggtgatttggcgtttgatgacgcgtacgagctttttaaagaggaaattatcgcgggcagggacaacgccgacctcgtgatcatcgagacgatgagcgacgcctacgaagcgaaggcggcgctgctggcggcaaaggaaaactgtgacctgccggtcattgtaacgtttacgtttgacagcacgggaaagcttttgacgggcagcaacatcccggcggcgctgctgctggcggagagcctcggcgcagacgcggtgggcatcaactgcagcctcggcccggagcagatggaaagctttgtcgatgaaatgctgacgctgacgaatttgcccattgtcatcaacccgaacgccggtctgccggtttccgtgaacggcgagacctcgtaccccgtggggccggaggaattttacgcgtacatggagcgctttgcggagaaaggcgcggcgattctcggtggctgctgcggcacgacgccggagcacatccgattgctggcagaacgcctgaaaaacaagccggtgaaggagcgtcacattgaaaagaagacggtggtgtcctcgtacacgcatacggtgacattcggtgcgcgaccgattttgattggcgagcgcatcaacccgacgggcaagccgcgcttaaagcaggctttgcgcgaaggcgatttggaatatctgtgccgtgagggcattgcgcagacggaacacggcgcggacattctggacgtgaacgtgggtctgccggagcttgacgagcccgcggtgatggaaaaggccatcatcaacttgcagagcgtgacgaacacgcctttgcagatcgatacctcgaacgtggaggccatggagcgtgcgctgcgtatttataacggcaagccgcttgtgaactccgtgaacggcaaagaggaatcgctgcacacggtactgccgcttgtgaaaaagtacggtgctgcggtggttgccttgacgctcgacgaaaagggcatcccggcttctgctgcggagcgtgtggcgattgcggagaagattttgaaaacggcggaaagctacggcatcgaccgcagcgacgtgattatggacacgcttgcaatgacggtgagcacgggtgcggataacgcgatgatcacgctcgatgcgcttgacaccatccgccacaagctcggtgtgcacacggtgctcggcgtttccaatatttcgttcggtctgccgcgccgcgagctggtgacctccacgttcttcgcgatggcgatgcagcgcggattaagctccggtatcattaacccgctgagcgacgagctgatgaaggcgtaccgctcgttctgcgcgctgatgggcatagacgtgggctgcaaggcgtatatcgaagcgtatgcgaacaccacggcggcaccagacatgcgcacgggcgccgcgcagcagagcgcaggcggcgggtctgccgaaagcgtttcgctgcaccgcgccattgtgaaaggcctgcgcgagcaggcgggacagctgacggacgagatgctgaaaacgacgccgccgctggaaatcatcaacggtgagcttatcccggcgctcgacgaagtggggcagggctttgagaaaaatacggtgttcctgccgcagcttctcatgagcgcagacgcagcgaaggaagcgtttgagcgcatcaagcagaaccttgcgaaaaagggcattcaggaggaaaagaagggtaccattatccttgcgaccgtgaagggcgacattcacgatatcggcaagaacattgtgaaggtgctgcttgaaaactacggctttgacgtactcgacctcggtaaggacgtgccgccggagatcattgtgcagacggctatcgagaaaaacgtgcgccttgtagggctttctgccctgatgacgacgacggtggagagcatggcggagacgatccgccagctgcgcaaagcgcatgactgcaaggtcatggtgggcggcgcggtgctgaatcccgagtacgctaaggagattggcgcggatttctactccaaagatgcgatgggcagtgtgcgctacgcggaaaagctgtttaacggcgaagtgtaaaaacaatcagagcatagaaaaaggacggcagttgcgcttaactgtcgtccttttgtactgtgcaaaattatctgcggtttgtaaaccacacgtcgatctcatcgggtatgggggtctcaaaaagcgtgagaattttttgcagcaggccgccgtctacggcgtagtcggtcgtttcaccggcggcaacggcagcgttgcgcgcttcaatgttttttgcccagtctgcatcggaaatgtcgatgtagtgccactcgaagtcgatgccggcatttttgtagtaggcagaaacatctgtgcgctcttcgcggctccagaagccccagtctaaaatgacattgcagcccgcgcgggcgatgtccacggcttttttgtggagatacgctttgatgtccgcgctgatcgcatcgcggcggtcgccgaggtcatggtggaagaggtcattttcaatctcatcgcaggagagcaccacagcgtgttctttttccttgagctgccgggtgtaaaagcccttgccgctgcagattttgccgcagatcaaaaatacttttgccatgctttttacattactctttgccgttccagcagtaggtgcaaaggcagtctgcgtcgatgccgacggactccatcatatcgtcgaggcggtggtagtgaagggaggtgaagtgcagcttttcgccgatcttccccaccatcttccggtacttctcgctgtccgggtcggcgtattcttcaagtgtggcacggtcggggtcgcagccctcaagctctttaatgacgcggcgggtgatgagctccatttcggacgtggagcgggagaagtttaagtatttgcagccgaagagcagcggcgggcaggcggggcgaatgtgcacttcttttgcgccgcttgcgtagagaaactcggtcgtttcgcgcagctgtgtgccgcgcacgatggagtcatcgatgagcaggaggctcttgccctcgatgaggtcgtgcaccgggatgagcttcattttggcgatgaggtcgcgcttgctctggtgcgtcggcatgaaggagcgcggccatgtgggcgtgtatttgatgaacgggcgggagaacggtacgccggactcgttggcatagccgatggcgtgcgcgatgccggaatccggtacgccggcgacaatatcggggtggacgttatcgcggcgggcgagcgcgcggccgcagttatagcgcatgctctcgacggagatgccctcgtagctggaggacgggtagccgtagtagacccacaggaacgtgcagatcttcatttttttgccgggggcgacgagcgtttgcacatggtcggcgtcgaacacgacaacttcgcccgggccgagctcgcgcaggtcgtggtagccgaggtttaaatatgcgaagctttcaaagcttgcgcagtagccgtcttccttttggccgagcacaacgggggtgcggccgagtttatcgcgtgccgcgtaaatgccgcgcggcgtcaggacgagcatactcaaagaaccgtcaacgacctcctgcgcgtagcgaataccgtcgatgaaattctctttctggtcgatgatggcggcgacgagctctgtggggttcacttcgccgttttgcatctcaaagaaatgcgtgccgcgcccgatgatgtcctctacgatctcattggcgttattgatcttgccgatggtcgtaatggcgaaggtgccgtgatgcgaacgcaccaaaatcggctgtgcttcataatcggagatgcagccgatgccgagcgtgccgtgcatagattgcgattccgttgtaaacttcgtgcggaacggagcgttttcaatgttgtgaatggccttgtcaaagccggtctccgggctgtaaaccgccatgcccgcgcggcgtgtgccgaggtgggagtggtaatcaatgccgaaaaaaaggtcgaaaacgcagtcagtctgcgatgctgcgccgaaaaaaccgcccataaaatagatcttcctttgctgaaaaattgaaggggcagtaccgcggggaatttatgcggtattgtccaaaactcttttattataacaaaaatcgcgttatccgaaaagagacacaaaagaaaaagaccaccgaaatttcggcagcctttttgtaaaggataacagaattttttacaagatgggttcttttgcctgaacggatcttgcgtgcagtgcaaaaatctcgtggcggcggtctgtgccgaagatgtgctgcttgtcgtactcggtgctgaagccgacgatgtaaatgacgagcagaccggtttgcggccacagcatggagatatccaaaagcccgtgcagcagaacgcaaacgatgacggagaccgtgagggcgtagcgctggtggcacttgtggctgcggtgcaggcggataatcttgccgacattgatggcaaagtaaccgagtaagaccgccgtacccacaaatccgaagtccatgaggagctccaaaagcaggttgtgcgaatgctttgcgatgctgtatgagccgtagaggtcatggatgcgtgcgtatgtattgtagccgcggccgaaccacggggcgtccataatactgccgatggcgcccgaccagatgctcatgcgttttgcaaaatcgtggcggatgagatcgatgcgtgggaggaaatcgagcgattcaccgaacagaacgagtgtgagcaaaatgccgagcatggtgaaaaggtacacggaaagccacttcttcttgccacagaaccacagcatgacagggcagacgatgagcagcaccatgaaagtagtgcggcactcggtgagctcaagcgcgataagattcaacggaatcagggcagcgtataaaccgcgcagcggcgtatcttcgctttttacgatgttgtagatgcagaagagcacgacgagcgaaatataaaacgcatagtaattggggtttgtaaagatggagttataccgcgcaccgtaaacccactccatgccgagcgcgcgctgaacgagcgcgacaaggaggcaataggggctcatgaggcagacaaaagataaaatgaggcggaacgcgcgctgggtcatcgtatagctgacgaaaatgacggcgatgaatgcgaacaccataaaagcgccgagcagaatatccgttacggtgccgcctgagaaaatcgtgacgagcagggagagcacccagaaagccgaaagaaaaaataaatcctgtttacggcggaagaaaacgaagctctgcttcgtggcggcaatgtaaaacggcaataaaagcagcgccagcatctcggcatagacggtgaggaaaatggaagccgttaaaacaagcaagaccttttcgtttggggtaagctctaaaaatccctttttcagtgctctgaatacttgcagataaatgcacctcctgtggaccgcggccgcataccgtgatccggtaaaaccgtttcaaaaaattacgaaatcataaaaatccaaatcatgtgcgtatatgcgtacatgagcacgctcatataaataagaaataccccagcgcggattactattttagcgcaacttttctggatttacaagggcttttgcagcttttttgcatttataaagagatttgtaagatttgattttaaaactgaacagaagatttacataaggcgcaaaactttattgaagttgcacaagatttgtctgcacaacttgaacaatgcgctgtattgaaatgggcatgacaggcgtgctataatacgaaatataaagggtgcgcgtttgccgcccgaggtttaggaggctgctttcagatctatggatatacgagtcttgcagtattttctggctgttgtgcgtgaggagaacatcacgaaggcggcgcagcttttacatatcacacagcccacactttcccgccagctgatggggctggagcaggagcttggcgtgaagctgttcagccgcaacaaccacagcgtcacgttgacggaggagggtatgttattccgccgccgcgcagaggaaatcgtgacgctttccgaaatgacgaagcgggaattaaagcaggaggcaatgctgaccggtgaaatttccatcggcagcggcgagtaccacggctcctgccatctttccggcattctggcggcgtttcgcgccgagcacccgaacgtgacgtacagcatttatagcggcaactccgataacattaaggagcgcattgaacgtggcacgttggacatcggcttgctgttggagccggtggaaatcagcaagtatgattttctgcacttcccggtgccggaaacgtggaacgcgctggtgcggtcggattcgccgctggcgcagaagccgtatttgacgccacaggacattgtgccgtacccggcggtgttttcgcgccgggaccagatccgcagtgagattgtgaactggttcggcgacagcgcggaccggctcaacattatcgcgcacggcgatttgcaatacaacatggcctcggtcattcgccgcgaaaacggcgtgctgttcacgctgaagctcgacctgcagcataacggcctgaaattcgtgccgctgcagccgccgatccgcgccgcgacggtgctcgtttggaaaaagaaccgtgtgctctcaccgctgacgaacgcgttcctcgattttgcgaagaaatacatttccggcatggagaaggataaaaaataagtattggacattcttttgatggtttagtatactgaaagcaagaaatcacgaatttttatagaaaaggggaagacacatggaatacgtaaaactcggcaactctgacctgaatgtttcgcgcatttgccttggctgcatgggctttggcgaagcggccgcggggcagcaccgctggacgctggatgaggaaagctccaacgagatcatcaaagcggcgctcgagaacggcatcaacttttttgacacggcgatgagctaccaaggcggcacgagcgagatgtttgtcggccgtgtgctgcgcgattttgcccgccgcgaggacgtggtgctggcgacgaaatttgagccgcgcaccgacgaggagattgcaaacgacgtgacggggcagcagcacgtgaaaaactgcctcgatgcaagcctgaagcgtctcggtatggactacgttgatctgtacatctgccacatgtgggattatcgcacgcccattgaggagattatggaggggctgaacgacgcggtgaaggccggcaaggtccgcgccatcggcatctcgaactgctatgcgtggcagctggcgcaggcgaattactacgcccgtatgcacggcatggcggagtttgtgtccgttcaagggcattataatctcattttccgcgaggaggagcgcgaaatggcgccattctgcaaggcggagaacattgcgatgacgccatacagtgcactcgccgcagggcggctctcgaggcatcctggtgagagctccaagcgccttgaggaagacaattacgcgaaatttaagtacgacaagaccgccgagaccgacggtgtgatcattgaccgtgtggcggagctggccgagaagcgcggctgtaccatgacggagatcgcgctcgcgtggctgctgacgaaggttgcgtcgcccatctgcggcgcaacgaatctttcgcacatcacggggcttgtgaacgccgttgaattgaggctcaccgctgatgagattgcataccttgaagagccctatgtgccgcacgcgttggtcggcgtgatggcgcagaaccatgggtgatttggagacgcagcgcatttcactgcccgcagggcaatttcacataccgaagggattcgtttcattgaaaaaggactttgcaaaatgcaaagtccttttttctggaaggggtggacactttagatccccccttgtattcaactgagaaacggcaaaaaacttaaaaaataaatttttttgcccaaaattttgcgcttggcttaaccggaatcgtggtaaactctgcaacaaaatttctgtataattattatagcatacatcccaagtcctgtccagtcttttcgacaaaaaaatttcaggagatgttatggtatgttaagagggttatgggccaaacagttacccacaaaaaaatagcaccgatgcccccgtattgaggacatcggtgctatttttttgcaggcaacctattttttcaatggcaggtttgcgtcctgctcatatccgccgacaaaccgtattctgatttgggtggcagagagaactgttatctgttcaataattcttcggataaagtcatcgttaaattcagtaaggttcaagttttcctcattgttgatataaagcaaggcttgttggtactggtattcctgtgcctgatctgccatcttctttttctggatttcctgcagttggctggtaaggcccattttctgttcagaaagctgccgtaacttggcggcatagaattcgctatcgccaccctgcgcgataattttaactaaggccgacatttcctgctgcaacttgtctatttgcttttccagtgattgcggtgtgatttgattcccggaaaacaggataatgttttcttgaacatcacgcagatttttcaggatatcttctttgtcctcgaccactttttgaatacattggaggattgcctgatgcaaggcttcttccgatatggttggtgaatgctggcagtattttgttccgaattccaatcgactgatgcagcgccagactactttcttcttgcccttttttacccatgtggtccggcgatacatggaaccgcattccccgcaaaccagcctttcggaaagtgcatacttgctgcagtatttgcccagcgcactcttggttttcttttgggaaaccttctttttgctgttccttctggtcagttcaagctggacatttaggaaatcctcacgagagataatcgccggatggttgtcagtgatgtaatattgggtgagctccccgttgtttttcttctttttcttagtcaggaagtctacggtgtaactcttttgcagcagtacatcgcccatatatttttcatttcgcaggatatgttcaatactggacaatccccattctggattcccccgcggcgtcagtatgtttcgccgttccaaggcttccttgatctgacgcaggctgcggcccagcaagaacaggttaaaaatcattttgatatgttctgcttcttccggcacaatctccggctctccgtcctctccttttttatagcccagcatattcttatagggaaaggcgaaatttccttgactgtacccttttcgtttgccccatttaacattgttgctcagagattcgctttcgccttgggcgaaagcactggtccatgtgaagaatttttcgcttgttacacgggaggtgtccagtccttctttttcaaaccggatgataatgccccgatccttgagcattcgtatgtacgaaatgcattgcagggtatttcgggaaaatctggatagcgactttgccagtatcatgtcgattttcccttttttgcactgctttatcatttccataaaaccggggcggttctcatctctggttccgctgatgccatcgtctgaaaaaacgccagcatattcccactcaggatttgaacgaatcaaatcatcgtaataggtgatttggttttcgatactggtctgctgttcttcctgctctgtactgactcggcagtaagccgctacccttagcttgtgattgcgggttcgggcctgcagcactggggagggtttaatctcccggatgattttctgcctgatgggggcttgtggctccatataaacgctcctttccggtaggctatatcatttttccgtttcgcagttgaaggtgaacggaagcatttggctgaataaggattttctctgttatgctgctaaacaggtcgtagtcgaaatcggaaatcaggggttgatcggccagccgttcctgtataagctgagtcatctgctccgaagcaccgctttcgctgacttcgtatttcgctttggcacaatccatgataagctggagcagttgatccgcattagcgcggggattggtcatctgccggtcaatttcattgttcaaccggaggacttcgatggataagcattcacaatgcctttcttccggtttcagcttttcccggtttttaattgcccggtttaatagggcagtcacgctttgcagcaatagttcgtctggtatgtagtctgtgcttatcccgcattttgggcattcccacaagatgtatcctgtccgcatattgactcgcttgaggatttgcccacagtttccgcagcagatctgctggcggatttttttcatttccacaggcaggctgccgccatattgctttgccttggctgctctgaggaaagctgcttcttccaactgttcctttgaaatcagcggcgggaatccttcatcgcctgcatacttggaattgtccaaaatccggcaaaccatggctttattccactgcccggctccttcccgataaggaatgcccgacaaggaggcatatttggcgagtgttgaaagggcggtcctttcaaggtattttgaaaagatagcctgtaccaaaggtccctcgtcagggtgcgggatgatttctcccttttccatttgatatccgaagggcaggtatcttttctttttcattggtacaactcctatcttctttcagccaattccatcccgttgattaaccggaaacagatggtgtctgaaaaaatcctcactttaataaccatattgcggaaagctacaggctcaaactctgagatactttcctgctcttcaaaaatttttagaagcaggtagcttccattgagtatttcatggtagtcgtttaagtcacggtatcgctggagctccttccgcaaattttccagcttggtgttattggtattggtttcactcatataaaaagcagaatcaatgcactcttttgctctcaaagtagccagcgcatgattctgctccaacagatccgctatttctttgttcaactgcatggcccccggatgggacatgaaatttttatcacgcagtttttccacctgcgtaatgaatggggttaaaatctctgagcgatttctccccagcttgttatataaggtaacgaatgcggattccacttcggactcctgcacattttctatggcgcacaattttttgtcacggaaatgccgataacaggcccatactacagttccggctttggttacccgcctgcagaatgtgcttccacactcgccgcactccagcattttggagaaagtataggtctggatttcctttttccgtccatggagttgatttttcttttttagaagttcctgcgccagacgaaatacattggggctgacgatagcttcatgggtattctccgcataaaattggcttttctcgccacggttctttactttcttaaaaggaaatgcgtcagtggtgaagcgtttctggaacaattcatctcccatatagcgttcgttggttaaaatataagaaaccccggtggcactccacacggggttccctttcagctttggcacttgggcctgtgcaagttcattggcgatttctcgaatgcttttccctgagagaaagtccccaaatatctttcggacaaccttcgcttcttccgggcaaatcagaaaaccgcctttttcatctaagcggtagccataaggcgcttgggatagacggtaggttccatttttcatccgcatgactgcgcctttacgcatattcttcgcaatggaagtggattcttcttgtgagaatgcactgtacatggaaaagtacatttcattggtcatgcggcctgtatcaatgccttctttttcaaacgcaacagctattcccaacattttcagttcccgaacggcttcaatgcagtcggcgctgtttcttccgaatcgggaaatggatttaaccagtatgcggtcaatcctcccagctctgcagtcccgcatcatccgttggaaatcatcgcgcttgtcggctctggtaccggttatgccctcgtcggcatagatgtcaatgaattcccaatcgctgtgggcttgtattagttgggtgaaatattcgacctgcgcggaaaaggagttcaattgatcatcggagttgctgctcacacgggcataggcacaaacccggattttctgtttctgtggtcttatcgtaggttctatgatctgcacctgtggcattctccgcaccgccctttctgcgctttcttgggcggcatctattgtgaccaccccgcagcaacaacattaccacaacggctggtacaaagctatcacgataaccactaaatatcgtatcgcaaaacccggtatctttcggcaatagcaacagtcgctttcttgtaattttcagaggttatgatgccatcggccagcatctttttcaaggccgaaagcgccatataatatttgatttcattgactatgagaggggatggcgcttctggattgtaagtaacacgcataaattcagccccctttaccatggcaaatggaggcccttttgggccgccctctggaaaaagcggttttccagccccttgacgtaaagctcataccgcaggtcgctctcggtggtgatcagtaccgcgtcgtgatcctgcaaaaattccagtatttgaatcaggatggcgggatcgtggctcaggcgggataaatcccgcacaagcacagcgcggacgaagccgccctgcacactccgcatcatctgcttcaggcccatgcgggccatgcttctgccggtacccatatcctgagaagtacctacaacggtatattcccgatgattggcttcctctaagagattccgcatctgctgaatcaggacgaacatccttttatcgctgctgcggctgtataaccacatggggcggtctgcgtagggaaattccgccgtttctgtttttctgttcatctatgtcaatctcctttatggcataaaataatccgggcctttctttgcccggatgaattcctcgacatcttcgatttttctggtgagccgaaggttcggcagggtttccagcacagccttgtgataccgttctccgggggctgcccgatagtccaaaatgctcaccacgcaggtgtcggtttcggtgcggatggcccgcccgaagccctgccgcagctttacctgcatatcggggattactacggttttgatataatcctgcagcgttgggtactgctcccgttccgcttcgctcaatggatcgggaacagggaacggcagccgcacaagtatgagcgacgacaccatatcgccgggaaagtccacaccttcccaacaagagcccgccgcgaacagcacagcgttgctggcctgtttgaactggtggatgacgtcctgcgagtgccgccatacttccatcaagggaaaagacagccggtcttttacctgattgtaaacagcgcccatgagggaataggaagtaaaaagcaccagagtgtggccatgcgtggcttccactaaacggcagatctgctctgccagacacttagcttcctgttcactgcccatctgtgttttgggaagatcatttgggatgtaaagaaggcagttttcctcataattgaagggcgaaaccgcaataaaatcctccagccgctgatttaaggacagccccatgaccttttttgtgcgttcaaagctgccgccagccatgagggtgccggaggtcaggatggcggggacgtccttcagccacagcgcccggcgcagctgctccggcagttcccggctggcggcgcagaggctggggcttccgtccctgtcgtactggatgtagaggatgtattttcggtccccggtaaaaaacaggccgagggcctgctctgttgttcccagccggtaaagaagccaccgtgggaggtgcggggcaagctgtttttgaagctgccgaaggagggaaagacaatctcgaagggccgcttcccgatccggcgttaaaataaaggcggtgcgctgggcttcttccagcagttcgccccggcacatggcccccatgagagcgcggaacttttcccgcagacgctgggaagcaaggatatatttttcttttgccagcaggtcgcagagttcacggaaatcctccgcagacaaactctgcccgtacatctggcgtgctgcgtccggcagcttgtgggcctcgtcgatcaccaaagcccggtaatcattgagaaggggccgcatttcctgcaaacggtgggcagcgtcggccagcagatagttgtggttgcagatctggacgaaaatctccgcgcttcgggcttccttcaggtattgatggtaccggcaggcatttcgcagcgaacagcttttctcacaaaccttggggacgcatacctgccgcctgtcaaatccactgaggccggttacggcgtctaaatcataataggtgcgaagggagagcagggctttcatctgctccgcattctttttcttatgtttcacggcttccaaccgatgagaaagacggacatcgcagacaaagcgttccttgccttttcgcaccatcgcccggatgggtttttgaataatgcggttctccagaaaaatccgggacaaaaatgggatgtactccccgatgatggcgtcctgcagggcaacgctggaggtggagaccactactggctgggaaccggcaggcccgtgcggggcaaacttcttcagtaaaatgcaggcggtcaggtaggcgtaggtcttgccaatcccgactcccgcgtcgcataaagcgatattgtttttgagcagggtgtccagcatggcgtggcatagggtgatctgttcttcccgaactgccagtccgttttgagggagaaggattcggaagatccgttcgatttccccatgggcctgctctttcaggctattgttcatttcggcacattctccttagagcaatttgctcttgtgcgttggcggcaaactgatgcggcgcagaaaacctgcgccgcacggattcgccgtcaacggcaatctgaataaaaataaaagggttgaatttgatgtgccgtatttgctgctcgccccccggcaaccttgggaaccatgcgggcaggcttgcagttgacaagccgttcactggctccccgaaggtcttgctgattacaacccaaggtcggccagcccatctgacgtgtgggcaaaacgatagcgcgtatcataataccccgcccaaggtcgtggcgaaaagggaaactaccccctctttccggtcaaaatgcatcgctcaaagccaacaacacaagccgccatccctgaaaagggaggcagcttgcgtgcggctcgtcatggcgctttttccgaagtttgtgcataacaaacttttagtcgctcgctcaggcgggaacgtacccgcatggctggtatttacttttcaagctgcaaggcgaacgtttctttttccccgttcgccctatagcccaggaaaaaggccggaatctttccgcttataaaaaattttttaattttttcttgagtttgaaaatccgcagatcaatggcgtttactgacaggccggttttctctgagatttccttgctgccgtatccgtccatcttcatgaagaggatttcgagggtgagcttgtccatattgtgtagcaaagaaaaaagctccatatcctcgatgctgtccagcagggcttcggtatcctcgacgggcagttccagatcctgtgctgaaacccagtccacataatgtgaccattctacctgtcgctgcaggtactgccgttccttattgaactgcgcccaatcgtatgtatgcaggcgttggatggtgtcctcatccacgccgagttctctgagttttctttcttctgcttctttccatttgagccactgtttttcggctctggctttgttgtaagccatggctgtttcctccgatcaatctgaaattttgaaaaattcagattgtcggggcggcggcctgccgctatgagttcttagccatgacctctttctaaaaacatgaaaaaagcgcacccgcccgcaggcgaatgcgcatagcgaggctgtttcctcgaaattggcatttaatggtaaattaaaatgagataatgtcgaacgaaaaagggctgcagcttcgtatgaagctgcagccctttctgtgtgcggtggttttcgccgcattgtcgccatcccctctgcatggggaaagcggacgttgttttatttccatatttccccatataaatttagatggggacagtataaaagagaaaaactacttttctgattcgattctcctttcatttgcatatttcgtagtgcttttatctacattacatgacaaaagaacaagaatatttatttaatcaaccaaaaaggtaaaacaacagccttttttctctgcacaggtaccttcaacgatccggcaggtggggttcgatttattcaggccgagtttttcctgcaggcttcgcacataggcggcagcttcttcctctccatgctccgaatctggatgaagccagacggcattgtggagaaaagacgcagaaagggcctgattcggatgggaagcaaataagccgagaatttcgaattcccgatggcttagttttacagcattaccatggagggttacttcccgcttgggctggtcaatccgcaatgagccgaattcataaacctttcccggccctcgaaatggctggtattggggttcggcaataatgctcttgatctgctcaaccaaacggtcggcttcttcatcactgcattcaatgatcattacttttggcatttggatactcctttcagtgcatgaattctggatatggatttctcttgtataaagggttttgggcatacgctgccacaataatggggaatgtagcccgatctgaccttttgaaatcgtcagcttgataacaagtatattttacaacattcggcagggtgatttcatcataaaaggttgggaaagcgcctttttctgtgttgccattacagggaaaataaaggggtgtgagtcctctcaccacagttactccactccctctttacgaacagcccgccctatttctttcgggcggttttatgccaaaaaacctttcttatgggcttctcggctcccttttcatcgcaaatcggaaaaatattcgctcataatcttagcgattcgctaaatacttttattatacacttagccagacgcgaaggtcaacggagtaaaatatagctatacacgaaatcacaggacagagcgaggtgatagggatgtttgattttggaaatcatttgcggatgctgcgggaaaagcatggtatttctcaggaggaacttgggcgtcgggtaggccgggccggatcggtaatcagcaactatgaaaacaatatcaaaatccccacgctggatgtcctcaccactatggcaaggatttacgatgtttcgttagactacttggttgggtttgataaaaaggatcaggtgcttttaacggatatgacggatgagcagcgcgatttggttcgtcggctggtaaaagaattgaaacaaagcactaagccgaaggccgggggattatctacgggtcagcaggaaattctcaacttgattatgcaggagtttgcaaaatagaaaaaatagaatctgttatgctgtaaagagccgagtaaactaattttattcggctctttctatatgtgcaaattgcattatttttcgaggttagaagaaactaactttgtgagacaattaacttgacagttttcaaaaaaagcagtatattaaaaccgttggattgaaaccgaaggttttaatctgtttacaaaatcaacctataaattcgagtttggagttgatggaatggcaaaacgtgtggagggcgttactgaaaaattgcttgaatcagctaaaaaagagttcttaaagagtggatatgagaacgcttcgctgcaggtgattgcggaaaaagcaggctccagcaaaggcgctatctatatccgatatcctgataagaaaagtctgtattgcgctttagtagggccaacggctgatgaattttgtaatttactcgaaggggaactccatcgctttaaaatactttcatcagatgagcagaaagaaaaggttatgacctttggaaacgacggcttttctaaggtaattgcatatatctacgatcatttcgacgagtttaagctgattcttaccagtggagagaatagcacatatcaggaatttatccatcggattattgaattggatatttcctgtaccatgcagtttattgaacagacaggaaatgacgcgctttcctccggacggcttacgccggaactggcgcaccttctgtccagtgctttttatgccggactatttgaagtggttattcatgatatgccccaagatcaggctgtcgagcatatccaaagaatgagaaggttttataatgccggatggaagacgatttttgaagaaaatgcggggtgatgcttttgagtgggtggattgattcatccggctgggttcattgtcctgtctgcggcaataaaacgagaacgaaggtaaacagagatacagtattaaagcgttttccgttgttttgccctaagtgtggacatgaacatatcatagatgttcaagaaaataaaatagtatcgttagagccagacgctaagacgcagagccgataatttgtaagacaggaatcttacaggttatcggcttttttagatgcaatggttagctacagctaacgaaaggaggattttttatgaagcaaacttcatctattgggatcatggatttcatccgtccgcataagggtggattcctttgctccgtggttttatctgtgttgggggtggccagtggtattgtaccatactttgcagtcgcaaagatgattaatttgcttattgtaggagaacaggatttttctatatacctattgtggtgttctgttgctttggtcgctttcatcatgaagtctgtatttcatgggttttcgacaaaagcttcgcacgaagcaacgtttgcagttttatctgaaatacggcgaaggattgcctcgaagttgacaaaggtttctatggggtatctaaccgatacgccatcgggaaaactgaaaagttctatggtagagcgagtagaacagatggaggttccattggcgcatatcattcccgaaatgacttctaaccttttggttcctgtcgcagtcattatctacttgtttgttttagactggcgcatggctctcgtttctctgattactattccgattggtatcctgtgctatatggcacaaatgaaagaatatcctaaaaaatacggggcagtcgtacaagcaggtaaacacatgagtgctaccacagtagaatacatcaacgggattgaagtcattaaagcgtttaaccagagcgcggtgtcctatgggaaatttacgcaggctgttcataaaaatgcagaattgattcttgactggatgaaatctacacaagggtattcagcccttatgatgaccatctggccagctgttttgattggggtactccccattggatgtattttctatatgaacggaagccttaccacagctgccttcatcactattatgattttatcgctgggtattgtaggcccgttggtatttgcaatctttttaaccgatgacttttccaaaatcagtaccatcgttggagaaatcagttctattttatcagaaccggatttagatcgtccactccaacataaaaacttaaacggattggatattactttaaccgatgtgaaattcgcatataaggatactcaagtcttaaagggtataaacttaaaaattaaacagggaactacaaccgctttggttggtccttctggttccggtaaatctaccatcgcaaaattgattgcttcttattgggatattgatgaaggaacaattacgattggtggggttgacattaaaaaaattcccgcagatcaagtaatggatttaattggatatgtatcccaagacaattttctatttaatgtgtctgtacgagaaaacattcgtatgggtaatcccaacgcatcagaccaagaagtggaggaaatcgccaaagctgcaggctgtcatgagtttattatgggcctcgaacacggttacgaaacccttgtgggaggagccggaagccatttgtccggtggagaacgccagaggattgccattgccagagctatgatgaaaaacgcacccgtcgttatcctcgacgaagcgacttcctatactgacccggaaaatgaagcggttatacaggatgcggtgaaccggcttactaaaggaaagaccttgattgttattgcacataggttatcgactattatccagtctgagcagattgcagtagtagaaaacggaaaaatcgccgcaactggaactcatgaagaacttctgaaaaattgtccgctttatacagatatgtggaaagcgcatatacaggcaaaagactctgccggtatgaaaggaggcgctgagaatgtttaacgcatataaacgtttttttgcttttgctggaaaacagaaaaagacgtggtataagggaatgggttatgaactgcttcgcagtatttttgaagctatccagtttattgctttgctggttgtgctgcgagccttggtagaacaaaatgttacaggcgaaacagcattggccgcactgggcgtcatgctggtcagtgtaacaggcgctgcggttttctggtatctggcccacaacagtgaaggacaggccaattaccatatgtgtgaggaaaaaagaatcaggatcggtgaacgtatgaagtacatgccgatgggctatttcaatagtcaaagcttgggaagccttacggctgcagcaacttctacaatggaagatttggagagtatgtcgtttgccgtcattgcccgaacgatggtggggatcatccgtactgttgtattttctattgcgattctgttttttgattggcgtatagggttgattttcttattaggagtactgttgtttttatttgttaattcacaattgctgaaaaaatcccgtcagctttctcccggacgtttgcaggcacaaaccaaattggtagattccgttcttgaatatattcagggaatgagcgttgttcgtgcgtttcatggcgataaggcggcgaatcaaacattaaataaaaccatagaggaaacggagtatcaaaactttaagctggagcgcaagcgtatcccatacaatgttctggagcaaattgtgttgcgaattgctgcggtagcggctgtgcttctttctatctggctatatttaagtggagctatgactttatttacctgcttgatgatggcgatttccgcttttcttgtttacagcgagcttgagtcagccggagaaatgttctttatgcttccgatgattgacgcttccattgacagagtggaacagattgatcatgctccccgcatggatgaacaaggtacaaaacaagaaacgaaaaatagggatattacatttgaacatgtcagtttttcttatggagaacgggaaattatccatgatgtcagcttttccataccggaagggactaccactgcaatcgttggcccctccggatcaggaaaaacaactcttaccagtttaatggctcgtttctgggatgtggacagtggaacagttaaattgggcgggacagatatcagggaataccagttggacagcttgatggcaaactttagtatggtatttcaaacggtctacctctttaatgatacgattgaaaacaatattaaatttggaaaacccggtgccactcacgaagaggttgtggcggttgccaaggcagcccggtgccatgactttatttctgcccttccggatggttacgacacggtgatcggagaaggtggagctactatttccggtggagagcgtcaacgcctatccatcgcacgcgccatgttgaaagattccccgatcatcattttggatgaggctaccgccaacgttgacccggaaaatgaagctgaacttcaagaagcgattgaagcgttgacgcataataaaacgattattatgattgcccacaggctcaaaaccgttcaacatgcggatcagattcttgttctggaggctggccgtatcatacagcgcggcagacatgaggatttgataaagcaggatggaatctatgcggattttgtccaaagcaggaagaaagccgaaagctggagtattgctggagaaggagccttgggagttggagtatgagcaaaaaaatattgacgcgcttatctttatttctccttgtgctgtttggcatcacgattttgactttcatctacacaaatttatcccctgtagatgcggctgaggctttggctgtgcgccggtattcaagacccactccagaacaggttgaattagtacgggaagaattgggccttgacaaacctctgatccagcaatatggttcttggctgtggaacgcgttacatggagattttggaaattcctacaatacaggccgccctatcatcgaagaactgacagcctcattagggccaaccatcacaatggcatcattggcgttgttgtttgcagccatatttagtattcctctgggtgtgctatctgccagtaaaaaaggtggattattcgataaaacagtttacttgtttgggatcgtttccatgtctctgcccaattactggattggttttatgctcctgctggccttttctgttcagattccgatcttcagcattatgggggcagacagcatgaaagattttattcttccggctttggctctggcaatcccggttgcggcaggtaatattcgtgtgtttcgttcttcacttttggagggatatagtcaggatttcgttttatatgcccgttcacgtggggtttcggaacgcagaatcgcttttatggtaagccggtttgcactgccccctttggtaacaatgctcgcccaaagttttgggtttatgatagcaggcagcgcaatggtggaatcagttttttctattccgggaataggttctatgttggtaacagcgttaaatgcacgggacactattacaatcaacgcatgtgttttgttaacagccgccatttttgttctggttaattttatagcggatctggtcaatatcgctttaaacccacacggaaaagcaaaggagaaggtttatgattcgtaaaattttacataaaccgcaggcactgcttgggttggccatgatgttaattgtattttttgttgtggcatttgcgccctttatagcaccgcatgatccatcagagctaaacgtcgcgcatgctttgtctgcacctgattcagaatatcctcttggaacagatgaaatggggcgctgcgtattttcacgattgctctatggcgcgcggtcatctatgtctatcgctctgccctcgcttatcattttggcacttgtcagtacggtcgtagctactgtctgcgcttatctgggcggtgtacttgaccggatttttgatgttgtttctaacatctttatggcatttccaccctttcttgtggccattactctggtgggattatttgaatcaaaagtgttcagtatcattctatccattgtaattgccatgtgggtatggaatgcacgagtggttcgtacctacgttctcagagaaaaacaaaaaccttatgttatcacctgccggatgtcaggctgttcagaactgcggattatattccggcatattattccaaatgtccttccacatcttttggtgatattcagtacaggactgtcctccattatcattatgatttccagttacgcctttctggggctgggcttggaggcgggaacagcagagtggggcgccatgttcgtgaatgccaaacaactgattttcagtcagccgcagcttctggtctatccggggctttgtatcctgtttacagccggtggatttaatttgttcggtgaggctttgcgggatatttacgcaccacgggagggttagaaatgcttgatatcaactgtttaacagttcgctcaaaactgacaaaagaggaattgcttcactccatcagcttttccgtaggcgagggagaaaccttcgggctgatcggagaaagcggaagcgggaaaagcatgaccagcaagtgtattatgcggctgttaaattctcgtgcttttcaaatcagaggggaaattcgctggaatggcagagatgtcttttccatgaatgcaaaagaactggctgactatcgaggaaaacagatcagtatgataccgcagaatcccatgactgcatttgctcccatggtgaagctgggaaaacaacttgaaatggggtttcgattcaataccagagaagaacggcacaacttttgtagagaacttacgaatacgttggccagtgtgaacttgccggatgcggaaaaaatttttaacagttatccggatgagctttcgggcggcatgctgcagagagtgatgattgctctcactatgcagcaggcttcgaaactgattattgcagacgaaattaccactgccgtagatgcggccagtgaatatttgattttaaatgaactggaaaaaataaaaacatcaggggtatcgatgctggttatcacacatgattttggtgtagtagcgagactgtgcgaccgtgttgcggtgatgaaatcgggagaaatcattgaacagggtagaacccatgaggtgctctccacaccacggcatgattacacaaaacaattgatggaagcaagtatactgtttcaggaggcgctatgctaaaggcagaaggaattataaagaaatatcaaataccgggtagaaaaaaagacctgttggaagccctgtcaggcgtatctatcgagcttgccgacaacagtatcacggccatcgtaggcgaaagcggaagtggaaaaagcacacttgccagaattttgtcctatatcgagctccccgatgccggaaaagttactttagataatttaacagtgacaggcgtcaaaagaaaaacgcttcaaaagatgcgaggcaaagtgcagcttgtcatgcaggatgcagccagttctcttgatcctcaccaaaacgtattacaaattttggatgaacctctccatcttttattggatatgggaaaagaggacagaaaaaagagagtcgaagaattgctggacatggttaatttagggggagatatattgaatcgtcgccctgatgaactttctggtggtcagcaaaagaggctctgtgtagcgcgtgctttggcaacagaaccacagcacattattttcgatgaatcttttagtgggcttgatgttacattaagaaagcaaattttgcatctgttacggaatttgcgggacgagttgagattgagttatttgattattacccacgatttagacattgcgatgtatatggcagataccattcatgtgatgcgtttcgggaaaataatcgagacagtttacaaaccgcaaagcttttcggattttcatgaaccatattctaatgagcttgtaaaggccgccctttcaaaaaggcaggctttgcaataaaaaacatgtaaaggagcacaaacatgaaaaaacttttatcccttcttttggcttgtgtaatggggttgacgcttcttgctggttgcagcaatacagatccctcatcctccagtaatggccaaacagacaagaacgcatctcaaacgatctctattgcgcaaagcgcaaacttttcgatgggctttgcccctgcggtacagtcctatgaggctacatattatatgaacaacttttatgagcctttggtcaaatatcaggacggagagtaccagccctgccttgctacagactggacaaattccgatgatggactcacctatactttccatctgcgtgaagatgtaaagttcaatgatggaacacccttcaatgcggaggctgtgaaactctatttcgacaatatgaagtctgtcataggaaccagttccaattacgggcagcttgatatgttgacatccgagatcacagtagatgatgaatacacggtttcctttcatttgactcgtccttattacaatgttctcaacgatttgtccatggtaatgccgagagggattctttcagcatccgccttcaatgaggacggttctttgaactcagaatatctgatgaatcatacgccgggtacaggtccctatatgtttgagagcgtgaatgatactgcaacggaatacacttttgtacgcaatcccaattattggggcgaagaaccggatgtagattccttcacagtaaaagttattccggaatccaaggtcgctgcaatgagggctggagaagtggacttcattatcggttctgacacattggatgctgcttcctatcaggaactgtccagcacggaaggcattacgggcgtaatttccgattttgattttgtcacagagtttattgcgcttaacgacgaagtggctccattggatgatatcaatatcagaaaagcgatccagatggctattgataaagagtctatcgctcaaaatatttattcgggcttgagaacggaagcagattcagttatgcctgcggatatgccctattgcgaggtagatgtgacaactccgagctatgatatggatgcggccattgaactgatggacaagtccggctggactgatacggatggcgatggcatccgagaaaaggatggtaaaaagctttcctttacgattacttatccctccacgggtgtgtatgacaaggtagtgcttttcttccaggattcgatgaaaaagcttggcattgaaatcacgacgaatcctattgacctgatggcatttatgcaacaggtgtttacagaagggaactacgaaatcaccgcgtatatgagctattggttcccctatgatccgtacacatttgtcgccaatatgtatccttctactgattatacagatgccagtggaatttattcgactgatcctcagatcgccaaagcacttgccacaatgagcgaagaggaagcgaaagaactgattgccggcctttacaagacagatgatccggatactgttcagaatatctttaccactgcccttaattccgcaaatgaaagcagcgttgtgattccgttgaactacagaaacgaatatgcggtgttcaataatgaggtgatagagtcctacacattcaacagtattccaaatcatgttgacgttgcagcaattaaattaaagtaatttttcatagattatctcttttacttttaatagataagggaggtgtgccgactgcgtctaacatcatccatggaggactatctggaagctgtatatatcctttttcaaaaacaaggggatgtccgttgtgtagatgttgcggagtatttggaagtaacaaaaccctctgtaagccgcgctgtaaaagaattaaccaaggcaaaatatctgcgtaaagattcaagcggcatactttccctgacatcttcaggagaacaggttgccgcagcagtatatgaacgccactgctttttcatggaacggctcatcgcggcaggcgtagatcctaaaactgcggaagcggacgcctgccggatggagcatggaatcagtccagaagcctttgaaaaactaaggcgttctattgaaaggcagggcgaagaggtcaagtgaaaatcatgcttttgatctttgaggatggagatgaggatgcgtttctcaaagttcaggggctggcccaatccgcttctcgtatagagctgatggagtttaggtcacaacagagtacctctgctttggaaatcagggaaaaccagcgccgggtattctgcaaagggcgggagatccctctcacgaaaaccgagtatgagattctcctgtacctttttcagaacataaaccaagtgctgacacatgaccagatttacgaaaaaatctggaaggagccagactatggcgaggctcggaagcttgtcagccatcatgtgcagtcaattcggcgcaagttgaatttaggaaaagattccagtatccgtctgcgctgtatccgtgatgtcggatacagccttgaaacaaaataaagccagcagcctgttttttgcaggctgctggtttttccatatatataacaaccctctgctgcttccgtgtgtgacatttctttgatttgcaggcgctattcctttaccttaaagaaaccgagggcgtcggtgcgttccccattttgccagacctcgaagtgcaggtggttaccggtggaatttccggtggtgccgacgtagccgatcacctcgccctgcttcacttcctgcccaaccgttacgcagatggaggaacaatgggcgtacagggtatcgaaggtatcgttgtggtttaccttgatgtggtacccatacccgccgccccacgagtcgatggcgttggctatggtgacggttccgtctgctgcggcaaggatgggcgtaccttccggcgcggcgatgtcggttccgctatggtaggcgatctccccggtaaaaggatcttcccggtatccaaaccatgaggtgatagtgtagctctgcggaaggggccactggaaaatgcccgtccctatccaatcggcatcggggttcacgatctgcccgccgccgcttgtgtaaccgcccagcagttccgcccacaggctttggttttccggctccgacataagggcgaggtattcgttctgccgggaattgaagttgtactggcgggccatttcatccggggttttgtgcgtgatggtgatttccagaatggtttccgtcaccgtttcggtatgggtggtttcgttcccatcctcgtctacttcggtaacttctacctcatggctttcggtgcgggtgctggaggataccgcattcatctcccacataatatttcgcagttcatccacctgcgcgtcatccagcgaagcgacctgcgccccatcctccgcgccagtaaccttggcggaaaatacagcgaggacgtcctcccaattgatggagagtttcccgtcgttagaggtggtttccatccggtcatggggggtggcgtcctctatctcctgaatgtgggccagatattccccgttgagggtagacaccgcctgcgttacactggtaccggtccccgtggagtcggagccgaaaaacaggccgaagcaggagccgacgatcagggcgattaaacaaatcaacaggataatgaccacagctacccagcccccggcagcaatcagggctatcaatcccttaattgcggcgatggttgctttgatggcggctgcggttgccttgaccgccacctttatgccggttaccgctgctttcgccgcagctttggcagcttgggcggctgccttagccgcctttgcggtggcctgcgctgttttctgtgccgctttcgccgcctgctgtgctgtttttgccgaacgctgtgcggtcttgatcctcttggcgctctgctttacgcctttcacagaccggctggctgtctttaccgccttttgcggctttcctttgatagtcttggccactgtgttcttcgtccgtatttttgaagatgtgtttttgacagccttgccgcctgcatctttggcccccgacagggtgcgggaaatctctcttttttctttcaccttccgggccgtggcctgcgccagctttttcccgccccggtaggtcaggttcgcgcctttcttggcggcggtttccatcccggacagcatctgatccccggcagtattggcaggggcgttagaggattccccgcgctggctggcgaagggcgtttccttgagttccgagatggatttatccttggatttcagccataaatccttcatggctgttttcggggccttggcagctttgtccagcagtttaggtttgccgccctccggcttcgttttaatttctttcaatggcatacctcctgtaaaaaagattgcagagtgtccaaggcggccccctatcagaatagtagttcgagcaaataagagtagtaaaatcttaaacatcagccaaagttctatataaatggtgttttggaagtctatccgccgttgattttttcgctgtaatatggcatattgaaagtgtatcatccatacagcttgaacgctgtcgacccttttaggaatgattttatgatttataaagttgagctaaaaatgggaacacacaatcagaagataacgcccatggttaataccaaatgggaggcaaccaaaaaagcaccatacaaatctctatctgttccatatcgatataagctgcaacatcatttaagttatgcttacgggagaaaattcgcaaaaacaatcatgcggtatgtttatgactatctgcgtcaagattgcgatatttatgcgtggtgggaatggggaaaatacacacagatatttgctcagaacagcaggcgctttttccgcctctctatacgacctgtgcaaagaaaataagcagagagccgaaggcggccccctgcaggaattggctttctctatggttacacccctctcagggcctcgtccggcttggtggtcatgagctgatacagacgggtgctgcgggggaagctgttttcaaagggcacaatattcccggcgcagcgaatcaggccgcagccagccgccacattggtgatgtacgagagctggttttcggaaatgtgcagaagccccgccagttcgtcccggtcggtggcggattggttcaagaggattaaaaattccgagtttgccagcatgaggcgggcggtgtcggaacggaggagctcctccacgttctgtgttaaccctgtcaccagcccgttgtatttgcggatgcgcttccacagcttgtagaaaaagtcggcgctgtactcataacggaacagcaggtaaaactcgtcggcaaatacccatgtggtcttgcccttcttccagttctgaatgacacggttgaagatggcgtcgagggtaaccagcatcccgatgggcataagctgttcgcccaactcccggatgtcataggcgatgatccgggccttggtatccacattggtgcgctgggcaaaggtattgaggctgccggtgatgaacaattccgacgaaagcgccagccctctggcttccggctccggctgttttaacagagagtggtacaggtctttcagggtgggcggttcgccctcgtagttgttggcaacgtattcccggtacacatcgtaggtgcatcggtcaaggatggatttctccttggcgctcacgttgcccgcgcccaccagctgctcgaacagggagaggatgaattcggatttttcaatcagcgggttgcgctcgtctccataggctttgtccatgtccatggcgtttagatgggtatccgaagaggcggatacccggatgacctcgccgccgagggcttccaccaaaaagccgaactcggattcgggatctaaaatcaggatatcgtcgttggtggacagggcgatgctgacgatttcttccttggcggagaaggatttgccggagccggatacgccgaggcggaagctgttgccgttgagcagcttcctccggtctgccacaatcatgtttttactgacagcgttctgcccatagtagatgccgccgttctggaggatttcctgcgcccggaagggaatcagcaccgcagtgctttcggtggtgagggttctcaacgcctgaattctccgcaggccgtagggcaaagccgtgtccagcccgtccttctgctgccagcgcaggacgctcatctggcacagatgctttcttgccgtagtgagcagggtttccgtatcgctgtccaactgctctttggtatcggctaaatgcaccaaggtcacaaggccgaacatcatcctttgatccctgtttgtcaaatcgtccagcatttccttggtttctttcctctgctgctccatatcgtagggcaggacagccgagaagttgttggcggcgttctgttttctctgccagttcgccgcattcgtttccactcctaagagcttgttctggatttcccgcaccgcttcgtcggtgggcaccgttaaaatatcaatggagagcatgaggctgcggtccatgtcgcagagctcggcaatcatggaatccttgatgtagctggcatagccctgcaggtagagcacgcggccccatcggtcgtttaagcggaagtggtccttctggaattccatgctgtcggggcagagccaatccttgaagctgtgcccctttttcatgtgttccttcaggtcgaaggcaaaggcggcgggctctccacccttgaagaaatcccggaagatctgcaggcgggcggctgcgtccagttcccggcctatggaggaaagctgggaaaggtgggtgatgaggtcggtgcccacacgggcaaaataggtgcgggcctcgtcgatggttttctttgccaccgtgatggtgatgtaccggtcctgcaccacgctgttgttggtgccggttaccttggagagcagcatttcgttgtactctttccggtaatggtccagcccgtcctctttcatgggcagcagcagggatttctcgaattctgctttgtcaatgcggcggttgttgatggtgatcttggcggaagcgccggagtccagcgcgttcagcagttccgaataatctataaacatcgccgtcttatcttctttgctggcgatgctgtaattgatgtcggtaaagaaaaaggttttggaaaaccggctccctacctgaaaaatcccatccggccagatgcgctggatggggatagcgtcctgtacggactttggaattttgaatttttctttttctaatttcgttgctttgagaagcgttttgatgataggcatccttcctttcagtgcgaaaaatgaaaaggttactgttctttcccagccggtggctggggcttgcgggttttccgtttgcggggaggcttttccccctccgcgatggcgtccttcatggcgtcatagtaaaggctgtcggatttaaacaccagcttcttcgggtacaaaaattccgacttgaaccacgcccaagccagcttttctgctgtcatcccgtggtatttgaaaaagccgcaggccgcaaagggcgcggctccgaggatgcacatccagcccacttcctcgctgccgaccaacgggcgcaggccgaaatagatgccgactgccacgcctacggccagcagggaacagataaactgccgggtggagaggccgaaaaaaatagattcttgatagtcccggatttcttttggtacttttacttctatatcgcttcactccttttgggcctacagccccaataattctttgacgatcctgtcgctcattcgtacagcgcctaccaaaaccaaaaggttgaagatgagctcgcccacgtagctccatacggcggtaactgccgaaacgttgggatcaaccgcaggcgggctggacgccataaccgagaagatgatacaggccagcgcaatgatggccccttcgaggcacactcccgcataggaacgcaggaagtttttccccacattgctggtgggttccccggcgaacgtggacatggggatgggcgcgatagccgtgtacatatataatttgaataggcggctatacactgtcagaatcatgatgaacgccagcaccgtaatgaacaggccgcccagcagggtgactgcccacagagggatgctgtcccaaaagcccacgttgttgattttgtcgatgatctcctgcggaagcgtcgttccgctgcttcccgacaggccggattgggtaatgatggtggaaaccatcccctgaatgattttgaaaacggccagcatgaggtcgaggccgtatcccaccgccgcctttgccagtacaaaacggatgaacattttaaatgccgcttccgggcgcttcagatcggcaaggctcgaacaggttttgacaacgccgaccgcgaaaaacaaaaccagcaggccgtacccaatggctttcagggccccgttgatgtccagcatgacctgccagatcccgccgcctttgaaggttgcgggatcttgggtaagcagcgtccagatttcagccagcttgtcgttccatgtttccagcgccgaatttaagttatcaacaatccagtttccggctggtcacctccttgcaaaaaaaataaagggaagcgcccgccaccgggcgcttcccttgactggaatacagaaaatcaggcggtgataaggtcgaggatttccttggcaaaggtaatcacgaggccgcccgccagggtgaggaaaccctgcgaacgctgggagggatcgtggctctggaaggagaggccgacctgcaccacgccccagcccaaaaggatgaggccgatggcgcggatcagggaaaagataaaatcggacaggttgttcaccacgcccaacggatcgctggcggcgaaggccgggatggaaaagcagcagaagcacagcacggcggctgcgtagacggaaaagccgagccgcccctttcttccaaggggcagggcatttgcgggcttatcgttctttttgggatttttcttcaaaacaaagcgattcagggttttcttcagaagcattcctccagttcaaagtgtatttttatgggtttagaaaatcctccggctccagcagttcaaaatcgtcgtactggtccggggaaaaatcgatatcgtctgcggcgtcctttgcctgcgtgtaatcgtagggcgcagcgccgccatcttcggtcagccggatattggggtggcgcatgaggtcgtatttgtcatccatcatggggcgttccccacggacaaaaagaatggctttgcggttgtccagcatccgcacctcgtcgggggtgagaagctcccggcccgtctgctggtcgttcacgctgaagctgccgcttcgcccacggctgcggccataggtgttcgtatccaatgtttccttgcccatgagctcggaaacgtatttgtgggtttccttttcattgccgccgagatagagaaactcgtcgcacaaccccaccagcgattcccactgttccttgaacagcgccttgatctgcgccatattctgcgcgatatagctgcaaaagatgttgcggcttcgcatggtggaaagccacggcagaaagttgtctgtgggcagggcgatgttgggggcctcgtcgatcagcagatggaccggcaccggcagcctgcccttgtatttccggtctgctacaaagtacagggtttggatgagctgtccgtaaatcatgcctacaaggtaattgagggatttatcgctgtcgggaatacagcagaacagggccacctttttctcgcccatttcctccagatggagatcgtcggtataggtcagccttgcaatctgcggcaggttgaaggccgacagccgaacgcccacactaatcaggatactcttgagtgttttgcccgcccccatcttaaagacatggtattgcttcacggcgatgctctccgggttccgcatttcaagccttgcgaacaggatgtccagaggcgactcgtattcctcatcttcctcccgcacctcggcagcagccagcatttccatcaccatagcgaagttctgttcttccggcggcgcttcgtgcatgaggtacaaaaccagtgcctgcagaagcgcggtttcggatttctgccagaaaggatcggcgctctgtgctccgggcggggtggtggattggatgagagtttcgatcaggcgcagcacgtccttatcgtcccgcacataggccaaggggttgtagcagaaggaggcgtcggggtttaacaggtcaaatacccgcacttcgtatccattggctttcaatgccccgcctgttttccgcaggatttcggattttggatcgcagatgaccagcgaacagttcccgcagttgagggcgttgggaatggcgtaggaacggcttttgccagcgccggagcccccgatgaccagcacgttggtgttgcgcttgtgcttatggccatccatccccatctggaaatgctgggtcaggatgaggttttccttggggttcttcttatcccggtatttctttacaatctggaatacatcgccccacttggcggagccatgctccacgcccctgcgggtgttcttccggctggaaacgatcacaaggacaacaattccatatgcaagagtaaaaaacagcaggcaccgggcggaatatcccgtccaatgaacagaaaaggggctgttcatggcggctgagagcttccccagcagatccacgaggttcatcccttcgctccagcttccggctgtcaatagggccagccaccagacgatgggcaacggcagaagccacacccaccatggattttttcttgtggttatcgaatcaaaaaatatccttcctttccgtgaaaacaaaaaaatcccccggagcccatggaaaagcgtttccaaaggctccgggggtaaagcagttctttatctgctgacgatacttctgtagctggcgcggacaagttttaagagcagacggtcgatcccgccgcagcttcggtctgccgccagatagtcgttccgcatcccgtttaagcacagcgtggcgtactggtactcctcatcgttcaggtacagcctgcgctttggcatgctgaggattcgatcaataaatagctgcagtttgccggacagttcaggctcaaccgattcctgcgcgctgcgaagcgccttgacgagtatgttccggtccccgcaggtcattttcaccagtcgctgctttgtcatggcgatcccttcctttctcttttttcacaaccaccataccacaacggctggcggaaagctaccgcacaaaagaaaacaaacggaaaacgatcagccctcatcgttccggctctttctccgccttggatttggcagccttggcgggcttgggcgctgcgacggagaactcatccggctggatggtctgctccaaatcccggaagctcctttggacgtcccggttgatggcataggcggcccgtttgacgtcgcccaaaaagccgcgcttatcgtccgcgctcctttccgcatagctttggcacaccttgtcgaaatgaaaggcggaggtatccaagccgaatttctgcgccgccacataggccgcgcagtaggcttgggccgcatacgcctgccggtagtaaccgctgcccaccatatcgaagctggcgtgggcctgctcacgggcaatggcgcagatggttgcggtttcatccatcccgtttcggacaaaaatggtgcgctgtttcggcacatactgcgcctgcaccccttggggaagctgatcggagatggcaagcggaacagggctgttttctaccatggtggcgatgatttcctccggcagatgctgctggggcggcaggggctgggggcctctggtctgagaaatgtcgtaggcttttgtgatggtataaccattcgctatggtaccgtcctctttggtgtattcctgatcggcaaagaaggtgtaccctttctcgccggaacggatggagcgtccggcttccttccatttatcgaaggtgcggggatgggtgatttcagtgttctgctcatacagaatgagcagattccgggtgctctggggcgtgcagttcgccatgaaattgagaaagcctttcatggattcgtcatccttgaacaccgactcggcctgtgcgttgactcttgcccaggtatcctcccgttcggcctgcttcatggcggcgtattcttccttggtgtactgctgttccggctgaggctgggcttcctgctttttgccgattaaactggataaatcgatagggcattaccttcctttctgttttttctttttcttctgtttggaatggctgggggtgggatgctggcgctcctgctgtttggccttttcctcttttttcttcgcttgcccctgcttaatctcctgtagttccttttttaccgagggcttatgttctggctctttagggtttattgagttgggcgaagagcttttgctgggcgaggaaggctcggacggactcttttccactgccgggggatttgattccttctcccggccagaagtaaaattttcggcggtatcctgctgggttgggccgatattgaaatcgtcctcaaaaccgcccacctcaaattccacttcgccctgctcggttttgacggtttccgttttgtcgggggccggggctgcgggagcctgtttttcctgctcctgtacgctggcgatggtggcttcgccagcctgcgctttgaccgcgtcaaggccgaggttgtcaaaaatgcgttgtaccttagaggcgtcatccgcgaacaccaccacttcgatgcggtccgccttttgcttgttccgaatgggaacatacaaaagaccgtgggttttggcttccgtggcgaactccttcatgttttccgtggggacgttaaagaatttgaacgggcgctgttccctgagcatccgcacaagccttgtcttgccgtgggttttcttctggtccttcagtacggcatagacaaacagcgcaaagttttttgccgccatgcccgacagcttgagagccatttccgtgccctcaagggtaaatcgaacgatctggtcggctggatcgcttccgtagttcagtcaattcaccttccttttatcgctccaagtcacaggagcgtttgtgttttgttttttccggcgaggcttctttagaaaaggaatcctcgccggggatgagggacagggcggagccgttgtcccactcaattccgatcgtgcccatatcgtctacataggcaacggtgcccttggtgccgggcggcggggcctgcggatcgtccatggaatgcagggtgatgcgggttccggcagggtactgccgccggaggcgttccacttgttctcttgtaggccgttggttcaaacaatcatctcctttgtttttcttgatttcgggcttccttttgctgttcttctttttcccgttgttcccgccgccgttgttcttccatctgtgccgcctgcagccgcttctccatctctatcgaatggatttcgatgttccggcacagcttggcggtatggcgaagctttttcaaccgctctgtgaggacgccgatctgcggagagcccggttcatagcgatagagcttctggcgctgctttatgaggacagcgatttcatcctccgctttctgccgaatggcggcaagctggccccggtcctctatgtggtttttaaagatgaattctgcctgctcgatccgtttgtccagcttgcggatatcctcccgcacagcatagcttggataccggggctttttcggcagcgcccccatcttgtagaggtaggaaaagtagagagcccgcaggccggaaagcctgcggggctgcgtttccccaagaaggagcaggaagcggctggctggcggctgttctttcccagcccggcggggtggcttggggtaaaggatgcggcgctggagggcctccggggtgtactgcttgcccaaggtcttaaaacgcacggtgcgcccattgcccggcaggatcagcgtggggtatttgcggtcaaaccgaaaggcatagccctgctgctccagcgtccgcaggaactgcttccatgtgagggaagctgcaaccgccgcattgagatcctgctggatgggcgttttccatgtgggcgctccattctgctcggccagccactggacatagggacgggcaatccgttccgatttctccgtatgaataacggagaggccatgctttctgcacagttcatcggaaatctgccgtacctgtgtgacataggttctttcattgctgcggtatttcctgccgcttttcatggacacggaattccagacaatgtggttgtgaatgcatttggtgttgagatgggtgctgaccaccgcctgaaagttcccgccgagcagccgatccgcaaattccagcccgatctggtgggccagttccggcgttacctctccggcagcaaagctctgcaccagatggaagccctgcacaccttcttccttgtgccacatttccttgacgcggcacatatcttgaaaagccgtttcacaggtgcagccgagagcggatgcgaacagatcctgctcggttttgtctttgttgagggccttatcgatttccccttccagcgattcctcgttttccctgcgggagcatttcttctcgtcgagggtatagtcgatggcgttgtcgaggcggtggacggggataatgctggtgtaggcaatagcggttttctcctttcttgggcgcaggtagcttaggctgattcacgtcttggttatgtgcgcgaattgcatccaaccgcaggttggctaccagttctcctttacttcttcccaaacctgccgggccagcttcgtcatttcctcgatatcctgctggctggcctctccataggtattagcgaccttggcaagctggtttgcgttgttgcacaacccagccaccttgtggagcagatccgtatggtggtcgcagggccttgcccgcagttccgcacccatgatgagggtgcggaggaattcctcacggggcaggccgcttgttttcacctgcgcttccagatgggccagttcctttttgttgagatggagaggaatgatgtggtttcgttttctcatagcgaggctccttttaacgctccggctctttccgtttccgggttttcttctgctccggcactctggcagggtgttcgtaatggacgggaatatcctgcaggcgcagcctgtcgcaatccgatgcgaatgccgcataccgggcgtaggaatacccttccgcatctacaagaatgccctctttaccggtttcacccttaacgagtacgcaatgccagcaaaggctgcccggatcaaaccacatcttgtcgctgtaatcgaacaggaaaatctggtcatccttgaggccggtttcctgaaactgccggaactgctcatcgcatagaacgaccacctgttccacctgaaaactggtctgccgctccggcacaggccgcagtgggttctgcccattgaggtcgttgatatggctgggcctgtggtaaaaaacagcgtgctcctgataggctttcggttcttccaaggcgatgcgttctaccggcactccctgcaggtcgacgttgcggtaatccctgccgtagccaagatacagggtatccttcccttgggcaatcagcatattttctttttccccttcggcccgcaccatgaggcagcggaacagcccgcccggcgaggcgctcatgatttcccggttatccttgaggaaggggtattccggggaaacgtcctccgagagtttttcaaaatcctctttgctcagaatgatgacctttgccacttcaaaaacgccggggacgtagtttacctcgttccggcgcagggtgtccagcattttggcgtttgccgcgaacgcggcgtattgcttttctctcagtattttcacctctcatttcttgaacaaaatcagccggtgcggttctgcgggggtttggggttctccccaagatgcgtttggatatccaaacgctatgcttgcaaaaccagtcaccggctggcaaagaaaaaacgacctcgaatcagaggccaccattctcatccgcttccttgatcttggcaagaccgtcaagggtggtgcagataagattgcgtttttcagcagccccaatctcagcggacatactgtggctgatttcgctgccgcacaccaccagcatacggcaccggcccagcttctggcgggcgatgttgtggaaatccctcttttcgtcggcgttgtccggctggaggtactgcgcttcactcagctttgggcagatggggacgtatccgagctcataaaccttgcggcagtagcgttttaataggcggggcgcggcatcggaagccgcgcaaatgtaggcgaatgctttttccatgatgattttcctttccttaatcggtattgataaaatggtggcaggctggttgtccatgtggacgtccagcctgccgtttggttttctgttggtcatccacgtggacaaccacaggatgattcggcggtttcttccgcttcggtatgggcttccaaggcaaagcgcacccggtcggagcctaatttgtagtaggcgtcggtaacttccacgcccacggcttcatatccctccagcttggcggcgaggacggtggttccagccccgcagaagggatcgaagatgcgcccgcccggtacgcagattttcaccaagtcccgcataagctgcaggggcttctctgtcacatgggtgcggttctgcggattggcgtagcggaatacccccggcaaacatcccacagggcggttcaccggcatggggccgttggagccccacaccacatattcgctttgctggcggaatcggcctttctgcgggcggctggtcatcttatcccataccacgcatcctctccagatccacccggcccattgcaaagcgtcggtgatggaggggtactgccgccagtcgatgaacaggcagacaggcgctcctggcctgcaggctttccgggcgtcggacagccactccgccatccatctcgtccagcttctctggtcccggttatccccgtcgaaatccggcagggcgttcttggggttcatgctgctgtacttctggttggtggtgcggtttttctccgagggtttccagccgcccgaagcatagggcggatcggtgatgagggcgtcgaacacctgcggcttgaatgcccggatgatctgcagggtatccccatgcaggatggtccagccatccccgccgctatgttccaacggcaaaatggattcgtctacgacttgtgcgagctctttcgttttgttcagaggcatcatcctttcgttgtttggttatcgctccctgtcggagcgttttttctgttgttccggcatgacaaagcctttcggcttttgcggctcacgaagccccatgagcggaccggtatattcatcggcatagattttcaaaggttctctgctgtggttttccagtttttctcccggcggcaattcatagaaaccggagatctccacatttcctaccacggttccgtagataacggcgtcgttcttaatgacaggagaactatggccggagccgggcaggattcttgcgtccccttggatggtaaccatattggtaacggttcctgcggcaacgatggcgttgtctaaaacccatacattccgatccagccgggcgtccccggaaatgatagacgagccaagcgcccggcaggcccaatgcagggtgctctgttcaatgacacgggagttttccccggcgagcgcgttatcgtagatccagcagcttccttcctgactgagattccgttcgctttctacaaagccgccaaggtcgccttgatgaacatcttcccgaacgtcctgtaacgcccggatgcggtgcagccatgggtattgcgggtgagcgatatcggtaatctcatacttctgatctgattggcttttcctgtctgcgttttgtgacctctgatcctgatagtgctgtaagagcttctgcatcatttcgccggcattgtactttttcgcaaaaaagcggtttatttcctcgatttccctcgaatgtaacggaggcgcttcaatcccaagcccaagacctatttcgccgttgtcattctgaagaagggcgatcttgattccaacgactttttcctgtaaagagggattgtcaaacccctcgaagaattcttccttgttcaaaatcagcggttcgctgtgtttcaatccgtcatagcccctttctatcgttcttctccacggtcctttttcgctttcttcgtttttttctccggcagatcgatttccacgtattggctgatgacgccggatgataggctgtaaaatgtacggaactgctccatcatctgtttcgcccgttccggctgcccattttctatcagcaggcgttcagcccttttgaggacggagaggatatccccatcccatttttccagcttcatcttggggcgtttaggagcaggctgctccatttcaatggagaaacgatcggtttcccaaaagtggacgctgattacgccgcctttaaccttgatttcctgctgttcaaaatcttctccccagccgctcgaaaactgatcccgcaggtgatcctgcaaggctttcatttctgcttctgtgagaggttccttcagacaaaccgtggcgcaggccatgagctcgccgccccggatctccaccgaggggatggcgctcagtaccttttccttaacgccggggttccattcttttctaaagcagagcatgaggttcccctcgttatagctgttgcagctttccacagcgcgaaggatcgggccttcgtattcggctaaatcagcgccgttcagcggtacaggaaggtcggctgtcccgttgttccagctatcgtcatccataaagtccccggcaagagggaaataaagtttacatataatgttgtttgcgtcgatgttccaatctcctttctaacgagagcaggccgccctctggcgggcggcctgtttctcatatcgttcttttgccagatctgcataatcgcagccctctttttccggcaggttcttcaccatgcggtatttgccctgataggctttttccaagtgttcagccgcccaccgcccggcaaagtcgttgtttgtgcagatttcgatttcctcaatttccgggtgccgcttgaggaaggattccaatgcaagcggctttttgaaggaaaaggagcgtggctgttctccttctttcggggcgctgattccgccaagggacagccgccatttatccgcagtcccttccagcgtcagatgggcgagggtttcgatggctgcttcgtacacagccagccggttggttgttcccttgggcgggaggcagaagcagtattgcttttcgctgccggacacctccgccttgaagggctttcctttggtataggtgccccgcaggaaggcgtaacgggcagtaccggcttcatcctttcccacgaacacggcgttgtggtagtccgcgctttcatagagaatccccgcccggacgcaggcttctattaccttgcggctgatcccgcgctttaggaggtaagcgaacaccctgcggttgtttgccgatgccgggggcagggcgaattccttttcctgctccggctgggaagggggcgggatgtagcaggggttttcttcacagagggccagcaccgcgtccacaaactttaccccttctaccttaatgagatagtcgagggcggatttgccgcctgcgtcccggcttttccagtgccagaagctggtttcttcattgatcttgaagctgtcgtgttcccggagttcaaactccccccggctgtcggttttgaccagttctccgggccggtaccgccgcaaaaactcaatggcggtcatccgtctggcggcgatgatttgttcttccgttactccgggcatagggctgctcctttctggttaaatgacagccgcccgcaggattttcgcctgatcggtgcgttcccacggaaattccggttttccgaaatgcccataggcggctgtctgtgcatatcttggcgttaaaaggtcaagctgggcgatgatctccgcaggcgttaagccgaacacgaagcgcgccgcctctgccagacaatcgtcggcacaaaccataccggtgccgaaggtatccacctccaccatgaccggcacggctttcccgatggcataggccagcgtgacttggcacttttcgcacaagcccgccgccacaaggtttttggcgatgtaccgggccatgtatgccccggaacggtccaccttggtgggatctttgccggaaaacgcaccgccgccgtgcggggcgaacacgccgtagctgtccaccatgagctttcgcccggtgaggccggtgtcggcttccgggccgcccaaaacaaaccgcccggaagggttcagaaggattttcgtatcctcgtccgggggtaaagcctgcagcgccggggccagcaccttatcggtgagttcccagcagagttcgtccatgggcttattcgggctgtgctgggcagacagcacaacggtatccagccgcaggggcttgccatcctcgccgtattccacggtgacctgcgctttcccgtccgggcgcaggccccgcaccatcccggttttccgggcggcggcgagggcgctggtgagacggtgggccagcaccaccggcagaggcatcctctgcggggtttccgaacaggcgtaccccaccatgacgccctgatccccggcccccagctgcagggcgggctgatcttccgagggatttctccggcgctctaacgaacagtccaccccggcggcaatatccgggctttgccggtggagcaggcattggacggaaaaacgggcgggatcatatcccgcctttctaaaaaccgaatgcacaatggaagggatatccggctcaaacaggctggtgatttctccagccacgataacctgccccttggtggccagcacctcgcaggccacacgggaaagggcgtcgtgggcgaggcattcgtccagcacactgtccgcgatgatgtcgcacagcttatccgggtgcccttccgtcacagattcggcggtataaaattgattcattttctcatttcacctccaaggaaaaaggcttgaggcttttcccgatttcctcgtaattgttaaagcgcacctcgcagcccaacaggtacgatacggcttcttcccattcctttaaggggtactgctctttgttttccatgcggtacaaatcccccagggctgcccacttgagctccggcagcaggcgcaggttggagataaaggtgcggtgctgctcggctaaaaggtctaacaatccggttttcttcaatcaatccctccagtatgataaaaaatgcaggcggagcgcctgtcagtgccccgcccggttaaacgcttccgctatttcttccttcggttgcggatgtgcaggaaaacaaggccgcctaaaatgacagcgcataagacaatcaaaataatggcttttggttccataggtcgattctcacctcacttctgtggcgatgactaccgtgcgggcgctttcccactcataggaacaggtgacgagcgtcagcaggcggcggtccgcgccgggtatggtttcggttttgcagagcgactgtgcgaagagctccttctgaaaagacaggaaatccgcatcgtccgcaaattcggtgcggttaaaggagagctttgtgatatcggttttcagcacagccgcaatgcggtattcccacagcccgtcgctggtctgcaggaggattttggaatgctcggttcggaaagcttcgtccgccatcttctggagcacagcgaacatggtcccatcgctcatgttgtgcccgtagaccacaaggttccggctttccggggaacagtcccactgaaagaaaatgcttccggcagtacgatgctcgcccttgtaggtgcgccgcaaatagtattcaggttcatcggcgctgctctgcagaacagggtaatccacacaggtgccggggatggaaatccagccctgaatatccgggtattcggcctgcagggcggagaggtttacaagggaggctgcctgttctttcccagccggtaactccccggaggattctccggggaggggctgtgcgtattcttccttcaaatcctgcgcttctttattggtcagccccggctggagcaccagaaaccagagaagccccaaaaggctcagggacaaaagaccgatgcaaaaacctttgaaaaaggttttcattcttctgcgccctgatcctcatcgctgccaccggcagctttccgcttcttgccggtatggtgcaggaagagcaaagcaccgccggacagggccgcgaacagggcaagcgcgccgagcagggcgggcatccacgggttatcgccggtctgcggtacggtaggcacttccggcaccagcttgttgtgcatcttgacggttgtggtttctcccgccttgattcctacggtctggtcatcgggcaggatgtacttttcggcgtcctcgccagctgcttcagctacggtgtattcgcccacacggagctcgacgttgatttcgccgttctcatccgtctggaattcctgctcataggggttgcccatgaagtcggtaccggtgattttgaaggtgcggccctcgatcttgtcatcgtcggctgtctttaccaccttcagggagccggtctgcgctttgttgaggaagcccacgccagcttcggtttcgatccgcacaacggccccgttttccgtgatggagaaggggtaataattttcgtcgcgctggaaaaattccgggctttccttctcatgcaggaaatagcttccccacacgagatccttcatctgatagagccccggctcggtttcggtcatttcgcccaccagctgatcgatctccgcgtcgaattccccgttgttgtccacatcggcgtaaatctcaaagacagccccggacagcttgttttccgggtagtcggcgtccaccttggtggtttcggcaatgcccttgatgatctggttttcgatacggatttcaatggtctgcccgtcctcggtgatttcaaccgggaaggtttcttccgtcaatacgaaggccgccggaggcgcgatttcccgcaccagccaatttccaaccggtaccttgtcaaattcaaagtacccgatctcattgctttcagtaactaaaaacgcggtttcttcggtgaattcggtttcgtcgaaacggaacaggccgatgacagcaccgcccaattcgaagccatcctgatccaccttccagccggaaaccttgccgcgctttaaggtgttttcaatgggttctccatcgttgacctgaatctgcaccttggctatatcctgaccggcgtattcaaacaccaccgggtatttttcatcgctcaaaatgtagtgctcgtcggtgccgatttcctttacatacagggaagcgccgcatggtacgtctgttttaaagatggcattgccgttttcatcgacgccaatcgtttcgatcagcccgtctgccgggatggaggttccatcggcggcagtcagttcctctgcggcgaacaggccgaaggtgatgtttttccattcctcattcatgccgatggagaagatttcgtcctgctccagcagcttctggaggctgatttccaccttctggcgctcgttgacaaaaccaacgcttgcggaggtaatctccacttcctgcccggcataggacagggtaacctctttgggttctggatcaattaccatgccatccggcgcggtgcgctccaaaatctgatagcggcccaaatacaagggttccgaggtggcggtcccgtcgctccctgtggtgagggtagccgccagttcaccggctttcaggtggacggtaccatccggggtgacgatatcttccaatgcggtgacgtcatagacagcgcccggctggccctgcacctcgtattgaggctggtacagcccgcctgcttctgccacgtggctgaatacctcgccctctttggaaacggtgatggttcctttctgcgcgatattgtatttctcgaccgtaatgacgtcctgcgttccgtccaccacaaagggaaccggctctccgtcgaacacatatccccacgggctttgctgttcatacaactcgtaatttccaaacggaagaggttccggcaacatgagggtgcctgtggaatccgtcacgaaggtgtcgatgtcgatggggctggggtagttcaagtgctgcaccacccactcgccggtatcggtattgcggattttgacagcagttcccgcaagagggatgatttttccgctttccagatcctttttctcaaaccggatgagggaagtaaaggtggggttattcagaatataatagtaggttttgccatgcttggaaatgaacacagagaagtcggggacaaatttctgcccctcagcccctgcggtttgatgcaccacatacaggccgtatggaagatcctttgaccgggcaaaaccataggaatcggtgattaaaaggtcacgctcggtttccttggcgttcccatagctgcctgcactggcaaggtaaacctgaaactccgcgccttcctccggctgctcgatctgcacttcatcgctggaggacgtggtggacaaaggaagaacagaggctttggaggcaaggctggcaaccgcagggacaagctgcggcacaattgatgcgcttggggcaggctccggctcgctttccggcgcggggctgctttcagaggacggttccccggcaggctctgccggggcttcggattccgcgcttgcttccggctggctggaggaagcagcttcatcttccggcacaggggtggattccgggatttccgaagaactggagtcgggcgcttccgactgcgggaccggttcttcctgttccggggtggcaggctgatccgtatgcttggtgatggcgatgctgccgagaatgacgtcctctgtggcagtcatggggatgctgttgttctccaaggtgaaattgcccggttccgcgcctaccgggtagacggtttcgtccagcaggtacccctcgctgggggaaatttcacggatgctgtaatccggtccgcaggggtattccttggtggtaaatttgcccccgttcgccgtggtgtaggtatccagcagggtttcgcctttgaacagcccgtacacagcgccatccaaagtggcgtcgccctgcgcttcatattcggtacttctcggcttgttatggccggaatcttttttctccatctccacggtgaatttcttcaggatattggaaaagctcacgctggaggtctggccggggtagatggtcacctgctgggaagcaggctggacgtatttgtccggggccttttcggttacggtgtagtttccagcttggaggttatccaccttaatggtgccatccggccccgttaccacgtctttttcgacgccgttgccggagatgtggaacgggattccctcgaccttgccatcctcggaggttttcacaagctgcagggcgcctgccttgatttcaagggaaaagcagcatttcaccggctcggcggagccttccacatcgaaggtgaccacgttctggtattcgtcccgcagccagtatttcgtgccgcctgtgaccacgccgggaacagaggaaggcagccgcttttcggcggtaatggtaccgaattcggtttcggaggtggagacgtgcagttcattgccactgacggaaaaatccacgcccggatagctgacagcgaaattccccagcacattgttctcatccaccagcgtggtttcgtttttcccattgctctcgttgtatttgagggcgtgggtatatgccccgaccgcgcttggatcatcggtggcaaaggacgggatggtgtggtaattcacgacgttctcccgaagctgatagaagatgggcttcgcggcggggctgttgacggtaaattcattgacgatctgcgtttcgtacccggtccccaattgctcgtgggcaatcagccagatgaggatttgggtggcaatgtactcgtcgatggcgctgccgccgtattttgttccggtttccacgttgtagcccaaggtcagggcggtgttgatcatggatttctgctcggcggtaaaagcggcgtaatcgtccgactggtcataaccgatacccgtgtgtacgcctacactgaactggatgcagtaggcagtgcggaaggctttcaggtcgttgatccgcagctcggtgaacttattggaactgtagccgccaaacggggcgggaagattggaactgagggaataccctctggtgttatggtcgatcatggagatgtacccgtcgtaatcgtaggaggcggcaaaggcgctgcttggcataacgccaatacagagcagtaccgccatcatcagggacagcagccgttttagatgttttttcatgcgattctccttattcgtaaaatacaaaaaggcccccgcaggatggagagaaaattctccatcccacgggggccagtgttcagattatcgttcttcgccgtgtttccggcggtggtgttttttatgggggatttctttttttggcagttccttctgagtgagccggaccgcttccagaacaggggcggtttcgatcccgttctgccggcagccgttcaggattccttccagataggctttggagggcatggcgggggtatccttgtacgggctgttcatggtgtaagccatgatttcatgcctgatcccatcctgatctattaccacaacaggttctttcccgtacaggtagggaaagccctcgtaatggtccagatgccgttcatcccgttcggagatccgccagaggacaccgtccacatagcttccttcttccggcaggatagtggcgacgccattcccgccgccgttcatgcaaaaggcaaggcggtacccttccagccggacggtatccaccacttccgcatcggggcagcggaaggccatctggtttaggttcatattgcttccataggcaaaatacagcagtgtaccagttggctttttgaaattttcggttttcatcacctccagtgttatcgttcttggtttcggcggttttgcaggctggggtattgggctttgtcataccgccatgcccggtcgccggggaggttcgagagcagatgttcccgcacatttttgtattccggcccgatgaggcccagccgtaaaaggaaggtgcggaaggtaaaggcggggttttcgctgatctcggttttccgcatcaccgtccggctctggttgatggccagcgcggagatggccagcgccagcgtgatatttgccctgacttttcctgcatggagggtgctttcaaaacagcgccattccaaggtgctgcgatagaacaccgaatgcaggttcagggcgtaatatctcgtccagttgtaatgttcgtagctttcatcccgcccgccgtaccattcccgcttgaggcgttccatggtggtattggtgggaagcttgcggattttttccagcatgggttcccgcaccttctggcaccagcgttccacccggtgttcattgacattgagggctttgaacaggatgtcctctttggaatacatgatggagagggcgtttttcaggctctgtggggtatgcttggaggcgtccacatggacgtgcatcccgcagcttccgttcacgacagcccccgcatggcgcagggcgcggacaacctcctgcagctttcccatttcgctgtattccagcttgggggaattcatctccaccttgtaggtgccatcgcttatgggaagctgctgccgcccgatccgatgagaagcatggatgctggagtcgtagacaaaccgccactttttgccctcgttgtctataacctcccacggatcgtaggtgcgggattcatgtgtctggcgggccatggtaccgaacagggaagccaccgcttccgctgctttctggcgggttagccccgtcatctcaatctcgcagccgaagtattggtcttttaaatcaatcgatggcggtcacctcccgatgggcggcggcaagccgtttcccgatggcttccaccactgtaacggtcacgccgtttcctgcctgcttgtatagctgggcgtcggattggagaggcaaaacgatatcaatccgttcatctgcccatccctgcagccgcaggcattcccttggcgtcaggcggcggatgcgcttgagcggctccaaggtgccttggtcgctgctggcggtgagggtatgggcgatttttcgtccaaccctgccgcgccgggtatttttctgagcaaacgccagattgatgctgtcgccgggatacgccattttgtaccccttttttgtattctccctgatgggcaggcccacctcatacaaaccggttttcccgccgaatccgcccgtctgcgccgcgagggtgcagcttaccccttccggggagtagactcgctctccctgcgcgccggggcggatttgtataagagatgtgcctgctgtttcggtgaaaggaaatacttttcctctgcatcttttattaagatatccgataaggtacaccctttttcgggattgggggactccgaaatccttgctgttgagcacctgccattccagaccataccccaatccgtccagcgcatggaggatggccgcaaatgtcctgcccccgtcatggttaagcagtccgggaacattttcaagcagcagatacgcaggtctttttgccgcagtcagccgggcaatttcaaagaacagggtacctcttggatcgtcgaatcctccacggtgtccagcaatcgaaaaagactggcagggaaatccgccgcacagcaggtcgaagtcggggatgccgtttggatcggcttttcggatatcttcacaaaaccactctccttttgtatcgaacagggcttcatagctttggtttgccttttcgtcgatttcgcaatggcctacgcaggtaaaccctccggcgcgggcgagcccttcccggaacccgccgatgccggagaacaggtcaatatatcgtatggttttctatatcacgctccttttgagggatttgatgaatcgttaaagcacaatcaatggacatcgcccctttttcgtgaactgaaatctatatgaaaacacccccgcaggcggctgaggcggtacctcagtcctgtgggggtgttgttggtaaggttattcttcggtttcttcatcttcaggggattcgtcggcaggctcggcttcttcttcctcgtcatcgtcctgctcccagctttccggcatgacgtcctcatcatcctcgtcggggcagttctcgtcgctgtcatctccctctgcggggatttcctcgccctcgttgatttccaaactctctgccggattttctgcttctgtatcatcggcttctccataaaatgatccggtcagaggattaaaccgattggcccgtgcttcctcttgggcggctctggcggcttcgaattcttcttccgcttcttccagcgcctgttcgatcaaactgatcacgaattccttttgggtaaggcggcggtggtagtttttctcgtagttttcaaggtattcctttaccctctggaacaattcctcgctcacctgaaacgctaatgttcttcctttttccatgactttgacagcccctttctcatagtgctccataatgaccatttcgatgaatttgctgattgtgctttctgtttccctgatttcctcgctgatgcgattgtgcaggtctaatgggattttgcaggtgatgcccttggtttccatgctctgtcgctcctttttcttttctttccctttcgggcaacacaagcatactgcaacccgcctgataaagctatcaccaagagcaacaacctttcagccaaagcagggctgacaaacgtcacaaccaacaagggctatgtttggggttttcagcggcttggcccatccattttcttttgctttttgggggtgaccggctgcatatcctcaaagaaatatccggccatctgcttcatccagttaaaatcctgttcttccggtattgcaaccgtcaggacaacggcgtctgaaatgcggccttttccgttttcccgatagtattcctcaaagctgccccaccagccatccgcgccggtcctgattatatcgtcgcgcccgtcaatgctgaggtaatagcgggcggtatctacgccgatggatttgccatctattttttggaaggcgtagatcttctcatcggcataaatgtctatggtctgccttggggcaaggtaaagcgtcattgtccggtctgtgtattcggggtatttctcattcggcttctccagcaggacaagccgggccgcatcgaaggatttgggcggtttgtaatccacggtgaggcgtttgagctcggcccctttgaaatcctcgaaatacaggggatcgccaaacacaatatgcttggggtttttgattttgtagatttcttttctcataagtcggttcctttcgttttaaacagagttaatcttctcccagcaaggaaccgaggaagcccatcatctcctgcgggatggcttcctccggctgcttcacaggctgggaagggacagcttgaagttcttcccgcagtacccgccgcagggtagtttcaaaggtttccttttcttggctctccaaaatagcctgcaccagaaaggcgtttttctgcccgtccggcacagcctgcaggatttcccaagccctgcggtggcgttcattctggaggttggggcgaaacccgaataggggcctgttcatcccttgctcacaccgcccgacaaatgcccaaaaatccgctcgaatccttcggcgttcacacggtcgtctatcagggcgaaaacccggcacaggccgtcctgttcgctcacattgcctttaaccactgccgcgcccccgcccagcatgattaccgggatggctttcaggtcaaaccccgattccatggctgccgagagaagccgttcggtgtagaggcggccctgcttttggatgatgcttcgggcgtcctcgtccatgctgcaggcttttccagccagcacgcgctctacttgggcgtcggtaacggacagccctacatcccggcggatctgttctttcgtttcgtcgatgcaacggatcatgccgagctccaagctgcggcaggttgaagcgttcgggacgccgttgtccagccgcatgagatccaccgtccagccgccgatatccatgagcagaacagaaggttcgttttggataagttcaggatggatggcgatggcggaatacccctgtgggaacagtttcacatcctcgatggttactttgtaggggattccctcaaatttgaagcacaccggctgggaagaacggagaaggtattcccggaagggctttttctcacggccaaatccggccagaggcagccctgctgcgaggtttacggaacactcagccttttctccgcgctgtttaatctctttggcgatagcggcaagggtaagcaggtagtagttgtcgttctccatcttgtttcgcaggatgggctgcctgcccgtcccgcacacgaaaaacttcccgccgtactccagcgtgttctgcagggtgtagggctcgtgggaatattctgagataccggctgggaaagaaaaatgccgggttttgatggcgtaatagccgtggtctatgccgatgttcatggttttgctcatcctttcttgacggttgttgaaaacttgagggctttgtttgggggcttagagtatgcttgctggaaagaaatgcttgttctttcccagctggtaagtaattagggggtgagggtgtgggagagggggaaagcgaaaaatcgctgcgaaaaacctccccggcggcctgccggagaggttctaaaaaagggcgcactacccccttgtatcttgagggcttaaaattggcccgttttagggattcgtcaatctatctatgaaactgccggaaacttctgcatttccgacaacgggaaaaaagggtggtaaacgcaaaaaagcggggcctccggcctgaattttcaggcggaagccccgcatctgctcacgaaaaatcttgatattgccattttatggaaaaggcatctatggaaaatcattttggattttgcgctctaaaaagcccgcaaacccgcatgaatactgacaaaaacggggtggacatctaaagtgtccaccccagatggtggaggagggtggattcgaaccaccgaagctagaagcagcagatttacagtctgtcccctttggccactcgggaactcctccatatacagagttgcgtaaacgcaaactcatattataaaaacgggaaacccgtttgttgcaaggcgaacacactgctcgcttgagacaatcgttattataatacatcggtgtgcaaaagtcaaccctgtttttgcgaaaatttgtgttttttcgcgggggaaagactttgcggttctggtttggcttgacatcatcgctttggggcggtatactgtatttattgcggcaggaagctgcgagggcgttgaagcgccggatcttgtttttataggattaaattgtgccagcggaggcgcgcggactgtatggggttcgtgcgcctttttgattttaggaggaatttgcatgaagactttgtattttgactgcggcatgggtgcggcgggcgacatgctttcggcggcgcttttagaactgtttgacgacaaacaggcagtgctcgacgagctgaacgcgctcggtatccccggtgtggaatttaaggcggaagtgagcacgaaatgcggcatcaacggcacgcatctttccgttacggtgaacggcgaggaggaagaaagcgctgacgtgcacgaccacgaacatcacgctcacgaccatgtacacgaacatgagcatcaccacgaccacgatcacgaacatacgcatgagcatgaacacgaccacgggcatcaccaccacagcagcatggcggatatcgagcatatcatcgggcatctgccgttggagaatgcggtgcgtgcagacgtgattgcggtgtataagctcattgcggaggcggagagccatgcgcacggcatgccggtttcggagatccactttcatgaagtcggcacaatggacgcggtggcggacattacggcggcgtgcttgctcatccgcaagcttgcaccggagaagattgttgcgtcaccggtgcatgtaggcgcgggaaaggtgcgctgtgcacacggtgtgctgcctgttccggccccggccacggcgtatattctgcgcgacgtgccgatctacggcgggcgcattcagggtgagctctgcacgccgacgggcgcggctttgctgaagcactttgcggcagcgttcggcgatatgccggttatgcgcgtgcagcgcgtgggttacggcatgggcaagaaggactttgaagtggcaaactgtgtgcgcgcgatgctgggcgaaaccggcgacggcgcggactccgtttacgagctgaactgcaacatcgacgatatgaccgccgagacgattggctttgcggcggagaagattcgcgaggcgggcgcggtggaggtcttcacgaccgccgttatgatgaaaaaaaaccgccccggcacgctgctgacggtgctgtgccgcgaggcgcagaaggaggccgttgtgcaggcgattttcaaacacacggcgaccatcggcatccgcgagacgctgtgccgccgctatgtgctgacccgcacggaggagacggtggagaccgccctcggcccggtgcgccgcaagttgtcttccggctacggcgtgcagcgcgcgaagtttgagcacgatgacctggcggcgctcgccgagaaaaacgggttgagcctcacggaagtgatggaaaagattggtagataaaatataaaggtttatgggcctcgcgttttgcggggctctttttctgtgtgcggaaaaacttgcaaaagtattgcaaaggaactgcaaaaactgtacggtttatattgaaacagcggggcgggtgtggtatgctctgggcgtagaaaggttacacaaaaccgaaaggagcattggttatgaaacggacgttaaggacgaaaatctggtgtggtgtgttggtagttgcgtgcgtcagcggcgtggcctttggcgttgcaaatttgccgcgtgtgcaggcggaggcggtctccggcggcgtggaggtcacggaggcaccggggaatgaagcagtagtttcggaagaaagcaaagcggaggtgccggagatctctggaaatcccgaagtttccgaagtatctgaaacggcggaggtatcttctgcgaaagaagaatttgaatcgcattttacagcggatgaaaaactggatttctccaagataccgaaaatcgttcgcacggaagacgggagcatttcaattgaaaacggcgacggcagttttgatgcagagaatgacccgtacttttctgcatcgagcatttacggcggtaaaaatgtgaaagccacgatcaaagacgtgcatatgtccaataaacttgaatatggtcttacgccagcggataacgactgctttgttccgtggtggataaatggtggttacccgtggctggagacctgcaagctgaacgaagacggcacgctttcttcgccgcattatgcgtttgcgtatgtcacaatcggctttgagaacaccggagatgaagcgacgggattcctttccggagtatacgacatgggacagtatgacacagacggctgccctttggatatgtccgagtgcacgaccgacaagcgagagctgatcaacggcattgcagaagttccgatgaatgcggaagacccgaacaagaccgggaatattctgttggagccgggtcagacaagagagcttgtcttcatatatcttttgtctgacgagagcgtctatgtgcgcacagatgatgaagccgctgaaagagacggtgtgaaaaattacattgagatcgtagaaaactactttatcgacgcctatacggaaaccgattgccgatatacaatcgatgtcaacagcggtttgggcccgtttgtgcactatgacgtgagcgacattgtgaatgatttctttacggagcacaaataattttgatgggaaggcccggcttttgccgggcagtttccttatgtttctgcggttttgcggagaaaaaggaaattttcaaattttttcattttagagttgacagaacggcgcgaaattgctataatattaaagctgtatgactcattagctcagttggcagagcacttgacttttaatcaaggtgtccggagttcgaatctccgatgggtcaccaagcgcgtttttacgcgctatgcgctggtgtagctcagttggtagagcagctgatttgtaatcagcaggtcaggggttcgagtccgttcaccagctccaattgattaaaactgagaacattttgttttcgcttttctatatatttattgagttcggtacggactcgaaccctgaaagggtttcggcgttaagaaaactttccggtggaaagtttttagccggaagcggcgtagcagctatgctgtaagccgtgaagacgcgcaagcggcttcgtccgttcgccagctccagttgattaaaatcgagaacattttgttttcgtttctatatattgtttccgagtgttttgcttggcagcaataaacagaacttgtttctgtttttataatatgagtttgcgtttacgcagctctgtatatggaggagttcccgagtggccaaaggggacagactgtaaatctgctgcttcttgcttcggtggttcgaatccaccctcctccaccagaaaaaaggactttgcattttgcaaagtccttttttctgtgaaataaattccttcgggatttgtgaaatataccttcggtatagtgaaaaaacaacctacggttgttgtgaaatgcgctgcggcgcgtgagatttatttcatttcacattttgcgtcagctgcgggcctttgtcaacgtggtaggtattttgcacagtgcccttgtaatattgtagaaatccgattataatataaccagaaatttactcttttagggggagtttaccatgatttttgaaaatatggatcgcattatttttgcaggggattccgtaacggatatgggcagcgcacagccggtgggcgagggcttgtttgacaacatgggtcacggctatccgcgcgtcatcgagagccttgtgacggcgacttacccggagctgagcattcgttttacgaactccggcatcagcggcaatacgtcgaaagacctgcttgcgcgctatgagcgcgacgtgctttccttgaacccgcagtgggtgtctatctgcatcggcatcaatgatgtgtggcggcagtttgattctccggcgctcaccgatcaggcggtcgacccggtggaatatgaagaaaacctgcgcacgatgattgaacaggcgaaaatggttgcgaagggcgttatcgtctgcacgccgtactacatggagacgaacaagagcgactttatgcgtgccagaatgcaggaatatgtgggcatctgcgagcgtcttgccgaggaatacggctgccgttttgtaaacttccaagcggtgtatgacaagtttttgcagtataaacactcttcgctcatcgcatgggaccgcgtgcacccgaaccagatcggcgcgacgctgatggcgaaggaatggctctcgaagtgcggatttgaatacgaccacacgccggaggcgtaagattccattataatctgggggagttgaaagcatgaaatttggtgtgcagctttacggcccgctcaacaacatgcagggcgaggttttggaaaagcttgctgcgctttccgcgacatcgacggcaggcaggaagtggacgtgtacacgatcccggtgaacggcggcgcggaaaagcgactgacaaagggtggctttaacgacggcccggagtattccccggacggaaagtacatttggtataacgctacaaactccggcttgatgcaggtttggcgcatggagcgggacggcggagagcagacgcagatcaccgaaaaccggcggaacaactggttcccgcatgtatcaccggacggaaaacgggtggtctacatttcctacggcccggagcagctggagccgcacgagcacctgccgaacatgccggtggagctgtggctgatggatgcggacggcgaaaatcagcacaagattctgtcgctgtttggcgggcaaggttcgatcaacgtgaactcctgggccggagacagcatgcggtttgcatttgtgagctacgcgattttggaagacccgaaatgactgacgaggtaaataaaaatgatttttgaaaataaaggcaaagagaataccttggagacgctgcacattgctttaaacgctgcgaaggagcgcggaacgacgcttgtggtggcttcgagcgcgggcgacacgcttatagaactcattaaaatgcaggaagagatcgggacaaatgtgccgatggtcatggtggggcaggcgtacggctacccgaagcagggcgtgaacaccatgacggacgagcggcgcgcggagttgaccgcagccggtgtgcatatcattcatgccgcgcacgctttgagcggtgcggaacgcggcatcagtcgtaaattcagcggcgcgtacccggtggagatcatggcgcacacgctgcgcatgttcggacagggcacgaaggtttgcgtggagatcgccatgatggcgctggataacggcgcgattgagcttaataagccggttgtctgtgtgggcggctcggcgcgtggtgcggacaccgcgtgtatcatcacgccggcatatacggcagactgccttgacacgaaaattcacgagattctctgcaagccgggtttgtattaaatcataaagcaatgacaaaagctctgcgcctgaaattcggtgcagagctttttgctgtctcacattatcgtttgccgcgctttttgggcggctcgcctgtccaacggcggctttggggcgccggcggttgactcgttctgccgtgctttgcgccgtttttgtttttaccgtcaaacggtttattgctgtttgcggcgggctttgggggagcaaaacgggtatcgccgtggcgggggcgcaaaaggcagtttttgcctgtgccaatgaggtcgcggcgattcgctttgatgagcgcttctgtgacgaggtcgtaatttttcgggtcacggtactggatgagcgcgcgctgcatcgctttttcgtgcgggtcgcgcgcgacgtatacaggcttcattgtgcgcgggtcgagccccgtgtagtacatgcaggtcgagatcgtggacggggtggggtagaagtcctgcacctgctccggcatatagccgaggtcgcgcagatattccgcgagctttacggcgtcctgtaaggtggagccgggatgcgaggacatgaggtacggcacgaggtactggttgaggtgcatttcttcgttcagctctttgtagcgcttgacgaagcggcgatagacggaattctgcggcttacccatcatgcgcagcacgccgtcggaaatatgctccggtgcgactttaagctggccgctgacgtggtatttaacaagctcgcggaagaacgtttcgtctttgtcattgatgaggtaatcgaaccgaatgccggagcgcacaaagacctttttcactttgggcaatgcgcgcagcttgcgcaggagggaaacgtaatccgtatggtcgatctccatgttggggcatggctccgggaacagacattggcggtttttacacacgccgaccttcatctgctttttgcaggcgggcttgcggaagtttgccgtggggccgccgacgtcatgaatgtagcctttaaaatcgggatcctcggtcatttttttcgcttcttccaaaagcgattcgtggctgcgggactgaatgatgcggccctggtggaacgtcagcgcgcagaagctgcatgcgccgaagcacccgcggcagctggcaagactgaatttcacttcttcaatggcggggatgccgccgagggcttcgtaatccgggtgataggtgcgcgtatagggcagggcgtaggtgtcatccatttcttcggtcgaaagcggcatctgcggaggattctgcacgacgaacaggtggtcgtccgggtagggctcgacgagcgttttcgccgtgaacgggtcggtgttgagatactgattgtaaaagcttttcgcgtacagctctttactggtggaaatcttatcgaagccggggagatggagcacgtcgtcgccgtcgggcgcgatgtgcgttttatacacggtgccgcggatgaacgtgagctcctgcacggggatgccgctgcgcagggcttcggcaatctcgacgatggagcgctcgcccatgccataggaaatgatatccgcgccggaatcgagcaggacggagcgcttcattttgtccgaccagtaatcataatgcgcaaggcggcgcaggctggcctcgatgccgccgatgatgatgggcgttttcttaaacgtgcggcggatgaggttggaatatacgatgacggcgtaatccgggcgcaggcccattttgccgccgggggagaaaaagtcgctgcggcggcgctttttggcgacggaatagtggttcaccatggaatccatattgccggcggaaacgagaaagccaagttttggctcgccgagtgtgcacacgctttcggggtcgcgccagttcggctgtgcgataatgccgaccgtgaaaccgtttgcttcgagaatgcgggagatgatcgctgtgccgaacgacgggtggtcgacgtaggcatcgccgctgatgtacacgaaatcgagctgttcgatgccgcgtaccgccatatcttcttttgaaacaggtaaaaaagccgttctgtctgatttgttcatgaaagttcctttaaatgctgccggtcagaatgccgcacggctctgtccagtcaaagtgtttcgtttcctcgccgagcttccacacggcgggacaggtggtctcgtgccaatcgagcgggcgcgcggtgggctggggctgacttgcgcggcggaaagcgtcgcggatgatggctttgcgctcgccgtttaaataggaagccggaacggagagcagcgtgggtgtgccgctttttgccacaagctccagccagcgcatgccgagcgtttcatcgatggcatcggtgagcggtacgcagtcggcatcaatggcgaagaagcggtcgtgcatcggcgcggtgaatgccaatgtgttcatgcccatgcggcgcgtacgtgcccagagcttgccgctgacgtcatcgccggtgcgattgaggtgcatgagcccagcgccaaggtggccgaaacagttgcagcccatgactatggcgtcacccgcggcagctaagatgcgtttatataattcaattaaaatttcggccgtcgtgcgggtctcgtccgcaaagcgccaaccgctgtccgtgagctcgtcgcccatttcaaagccccaacggccgagtacgtcgtaggaagtgaaatcgtgcttgatgagcttgtaaccccagcttgagacggtgtggatgtcctccgcgatgtggtcgagcacttcgggcacggaggggtcgaggtattcggggtcacgcttcgagcgccaagaggcgggaatactttcgctgtgatcccataataaacgtacccagatgcccggctgtatgccggattcgcgcagctttttggcgaggtccggcatgtccggaaagcccttgttgcccgcgcgccacgggccgccgttgtagttatccgcacggtcaatttgccagcagtcgtcgatgatgaaccacgggcggtttgcgagcccctcggtgagttcggcgagggccttcgcttcgcgcagaacgtcatcttccgtggcatgcccgtaggcatggtaccagttattcgcgccgtagacgggggatttcggcagaatggggttcgggctcaaaacggagaaaaattcacccatggcagtaaagccgtcggcgtcttcgtattctgcgcggcaaagctccgcagcgcagagggtgcggccgtttaagcgcacgccgagaccgccgcagcgcacgtcgagatatacgctgtacccggtgctttcggctgtccaccagcacatggcagcgggctgcgtgtgcacgccgaaggcttcggtcttgttgccgctctgcaggaagaagtaccacggcatgacgcgatgggggacataaccgcgccattcatagtcgccgtagccgcgctcccaaacaccgcctaaaacctgcgctttttcgggcagcgggtccgcgaaatagagcgtgacgcgctgcacgggcgatgtgtcagcggtgacgtatacgcgcagagcttcgccgttcggctttaactcgacggtgatgtctttataggtagttggattttgaaacggaaggaatttttcttcgtcgtcggtttttaagagcatgccggtgggcatgggaaatttttttggattcataggggtgctccttcggtcatggatgcttttttatagtataacacaggatatgcaaaaaggaaagtgatgaaattccgtgaaagctgtacgaaaaattcgtttgattttcttccttgtcaaccgtgcaaaggtgtgctatgctttaacatgtacgcacaactgagttttgtatcggttgacagtttcaatggagaggacaataaaaatgaaagaaaaatttaaagacagtgcactttccccgaaagagcgtgcggaagacctgctgccgcgcctgacgctgcgcgaaaaggtcggtcaggtgaatcagaagctttacggctttcagagctacacctgcaacggcgagcacgtggagcttgcggacagctttaaagaagaagtagaaaaatggggcggcctcggtgtgctttacggcttataccgcgcagacccgtgggcgaataaggattatacgaccggccttaccggcgtgaacgcaatccgcgcctataatctggcgcagcactatgtactggagcactctcgcttcggcattccgatgctgatgagcagcgagtgcccgcacggccaccaggcgctcgacggctatttgctgccggtgaacctcggcatgggcgcagcgtggaacccgaagctcgttgaagagggctttaaggtcgttggcgagcagcaaaaagaaatgggcgtggattttgcgctcgtttccatgctggacattctgcgtgacccgcgctggggcagaagcgaagagtgctacggcgaagatccgtacctctgcggtcagaacgctgctgcggcggtgaagggctgtgcgagcgccggtttggaggttgttgcgaagcacttctgcgcacagggcgaaacgaccggcggcgtaaacgccagtgcggcgcgcatcggcgagcgcgaactgcgcgaaattcatctgcccgcgatgaaggaggccgtgaaagcgggcgcgacgggtgtgatggcagcatataatgagattgacggtgtgccgtgccatgcgaatgagtggcttttaaaggacgtgctgcgcgaggagcttggctttgacggcatcgtgatggcggacggcgtagcgattgaccgtctcggtatgctgacgggtaacgacaaggcggcaaacggcgcgtatgctttaaatgcaggcgtggacgtgagcctgtgggacgacagcttcccgcatctggaagaagccgtggagcgcgggctcgtttccgaagaaacgctcgacaaggcggttcttcgcgtactggagctgaaatttgcgcgcgggttgtttgagcacccgtaccttgaagaaaaaccgctgacggaatacaatgtgccgaaaacgtttccgcagagccttgaaattgcgcggcagtcggcagtgctgctcaaaaacgacggtgttctgccgctgaaaaaagagaagaagctgcgtattgcggtcattggcccgaacgcagacgcgctgtatcagcagcttggcgactacacaccgccgctgcgtgacggtgtgggtgtgacggtgcttgacggcattcggaacgaatttaagaacgccgatgtacgctatgcgctcggctgcacgatctgcgacgacgatacttccggtattgcggaggcggagaagcttgcggaggagagcgacctcgtcattttggcgctgggcggttcttcaagccgctttgcgggcgcggagtttgacacgaacggcgcggcaatcgtcggtacgaaattgcagatggattgcggcgagggcgtggatacctctgatgtgcgtctgccgggcgcgcagaacgagttggcgaatgccgtgtttgaaagcggcaagccggtcgtaacggtgctcatttccggccgcccgcatgctatccccgagattgcggaaaagagcgatgcggtgctgtggtcgttctatccgggcccgtggggcggcacggccattgcggaagttttgagcggcgcggcagatccgtgcggctgcctgccggtttctgtgccgcgcacaacgggacaactgccggtgtactacaacgcccgcgcttcctacgacatgatgcgttaccgtgatttggagaacacgccgctgtacccgttcggcttcggtttgcactacacgacgttcaagacgaccgtaaaggacggcacgccggaaatttctattgcgacgcttgaaaacggaaaagcgcataccgtgacgtgcgaggtggaaaacaccggcagcacagcgggccatgcgacggtgcagctgtacattcagggcgtgagcggcacaatcgtccgccgcgtgcgcgagctgaaagcatttgagaaggtgtatctccagcccggcgaaaagaagacggtagaactgaagcttgactgtgacgcactgagcatctggaaccgcaaaatgcagtttgcgccggaagagagtaaagtagagctttacgttgaggaaagcggcagcaaggtctggaacggcgagctgaaaattacgaagtaaacgaatatagtcaaaacaaaagcaccgtgccgcacaaggacacggtgcttcgtttattgcagttgtgcgatgctcgtcttcgcgacgtacgttcggtcatacggtatatgttgcctgttattgcaaaaaggttgtttagcggatgtccttgtactcggatttttctgcgcggcgctgctggatgtaggtgatgagctcaaagagaccgtctgctaaaatgctgatgccgaagaacatgatggcggcttttgcggcacggaacggatttacgagcagcacgatgccgagaatgagcggcagtacggcggagatgagtacccagaagcggtaggggctgtacaccgagagggcatcaacggcgagcggcatttttccgatgccgtctacaagcagcatgatgccgagcgcgatgggcaggaaagagaggacgacgtacgggcgggaaaagcagaaaataccgaacgcaaggcagagaatgccgatgacgagcgtgccgcctgcagtgaagccgaggtttctggcttttataaaataccagaagctatgtgcggcgtacaaaatgagtgcagcggcgatgccccagcaaaagacggtgccggacatgcccggccaaaacgtgagcacaaggccgagcgccatgtaaaggacggacgcccaaagagacgtggtgcggaagaaaatgtttttcatgaagataagtcctttctataatagagtaatggagtgtgtatttctaaaggcggttttgaccgcctttcaagaacccccttgatagggtttcttgcggcgcaacaattcaccggattgttgcgcctattttcctgatcttagttaggcaaagggtgtttcgacttttgcgaaagtcgactcagggctttgccccgagcccccaccaactttttgaaaaaagtttgaacaaagactttattcgtctcgcttttcgtcagcttgtgcgctttagttcaaaatgatttttggagaagtttaaaatgccttcgtcgcgcattttgcccatttctttggaaagtgcgctgcggtctacgctgaggtaatccgcaagctgctggcgattgaacgggattgtgaagctgtcgctgttttcgcggatggcctgaaacgacaggtatgaaatgagtcgcccgcgtatcgttttcggtgcggtgtggaaaatgcggcgcgaaagcgacaggtttttctgcgcgctgacgagcagcaggttttcaatcagcttgccgtggtgcccgcagtttacggcgcacggggagaggatctgcgcggttttcaaaaacagaacggtgcagttttctgcggcggcgacattgacgagcatcggctcgttcggcacgcaggcgtaggtctctgcaaagacctgcccggggccgactttatcgagcacgctgcggttgccgaaaatgtcgtcgctttcgatcgtcacgctgcccgtgagcacgatgccgagcgcgtttgtgtgctcgcctgcgtggcagatgagatcgccctttttatagctgcgcgtttccgtttttaggtgctcgagcaaaacgccgaaatcgcctgcggggatgccccgaaacagcggcgagcgccctaagatgctgtaatccgtaaaatagcctccttttttcaatcttcgttgttataacaacatactttacagcctaatcgtagtatactgtgttcgtaaagtcaagagaaaaccttgtggcttttgcaaaatttaaaaattggaaggaattttgaatatgatccgtaccatcgttcactttgatgaagaaaaatgcaacggctgcggcctgtgcgcgaatgcctgtcaggagggcgccatcggcattgtaaacggtaaggcgaagcttctgcgcgacgattactgcgacggtctcggcaactgcctgcctgcatgtcccacgaacgcaatctcctttgtggagcgcgaagcggcggcgtttgacgaggaagccgtgaaaatggctatggcagagaaagccgcgaagaaagaggcagaggaaatggcagaaaagctcggcacgccgaagttcaccggttgcccgggcagcatggcacgcgctattgagagaaagtctgtaaatacggataacagtgcggtcagcggcaagattgaatccgagctgcgccagtggccggtgcagatcaaattagcgccgatccgcgccccgtattttgacggcgcgaacctgctgattgcggcggattgcacggcgtatgcgtacggtgattttcaccgcgactttgtgcacaaccgaaaagtgctcatcggctgcccgaagctcgatgagggcgattacaccgaaaagctgacggagatcatccgtcagaacgacatcaagagcctgacaattgtgcgcatgcaggtgccgtgctgcggcggccttgagcgagcagcagtgaacgcactgaaggcgagcggcaagtttatcccgtggcaggtgaaggtcatcgcgaccgacggcagtctcgtagaatgaggacgggaaatcaagcgtgggatgcgctgttgggggcgcttgtgggcgttgtccgcgcggagcagaaaaacgcgaagaccgtggaaacggacagagtgctttttgagggctttgccgcgcttgcggaggatgatgaaacggcgttgcagaacatgctggcgtgcgcccacgcggagaaaaaccgcattgcgccggactgtgcgtattgcgccatgccgtgcggcagcacgagcgatttagatttcggcactgtgcgcaacgcgcgggaggctgtgcggaagcagaaatttgccatcactgaacggttgatcgaaatcgcgccggggctgctttgcaagctcgaaagcggtgagttgggcgaagacgagctttttgtgtttcacaaagccgtgtttgcgctcggcgaagattggagcccggaggagcttgaagagatgcttgaaactctaaactgaaccgttttgttgcaaggaggaagctgcggctttcctccttgacttttttaacttgatattgtatgatgagcacaaagagggtgagatttgtgaccgattatacattgcagccgattcccggcaagacgctttcgcgccggctgcctgagggcacagcgctcgttttagagggcggcggcctgcgcggctattacagttgcggcgtgatggaagcgttcatggaaaaagatctgctgtttccgtatattatcggcgtttcggcgggcgcagcgaacgcgctttcgtacatatcgggccaaccggggcgcagccgagagatcattgaacactatgtcgggaaccccgactatgtgagcacgcgaaatcttttgacaaagcacacgatgttcgactttgattatattttcggcacagtgccggaaaagcacatttttttcgactgggacaagtttcatgagcaggatacgcgctttttgaccggcgcgatgaactgcgcggacggcaagaccgtttggtttgaaaaggacacgctaaaagcgccgtttatggcttcgcgtgcatcgtgctccgtgccgctcatcacgaaaattcagcattatatgggctatgacctcttggacggcggcatcagtgacccaattccaatcgaaaagtcgcttgcagacggcaacacgttccatgtgatcgttttgacgcgcaacaagggctaccaaaaggaaccgtttgggcacacggcgtttttgaaagcggcgtttcgcaagcaccctgctgtggcagaagcgatgcgcacgcggcatgagatttataaccgccagttggcgttgtgtgaaaagcttgaaaaagcgggcagggcggtcatcattcgtccgttaaagccgctcaacgtcagccgcacaaaggcggaggttcccgcgctgctcgctttacatgacgagggactttatgaggggcgcgcggcactcggttcatttgaagaaatgcttaatattaaactctaacaaaaataaaggaggcattttcatgacactttttaaaatggaaaaccgcagaaactttgggttttccgcagaaaatccaacaggcacaaaaggcggcggcacacgcgccaaggactgtgaaaagctgagtccatgcattcaaattcagcccggcgagaccgttacgctgtgtgacacggacggcccgggcatggtgacgcacatgtggttcacgggttacgtgggacactcgtttattctgcgaatctactgggaaaacaatgaacagccgtccgtggaagcaccgttttcggcatttttcggttgcgcgtatgacgagaatttttctgaccgcgacggcaattacccggttttgaactcagctgcgatgctcgtcgcgccggggcgcgggttcaacagctactttgaaatgccgttcagaaaacactgccgtattacaatggaaaatcgcggtgaaaagccagagacgcttttctatatgatttccggatggtatggagagattcccgaaaacagcggttattttcacgcgacatatcggcaggagcaccctgtgcagaagggacgctcgtatgtgatcttggacggcgtgcacggcaagggctgctttgcgggcgtgacgctggcttccggcatgaacgggcacaacacctgctgggtggagggtgaagccaaaatgtacattgacggcgacacataccccacgatgaactacacgggcacggaggattacttcggcggctcgtatggctttggcaatgacatttacctcaaccgctaccagacgttcagcgggctttatacgggtttgtatgcgattttgggcgacacgaaggaaatgtataaccaccaaaagcgctttatgctgtaccgctggcacgtgaaagacccggtttatttcgatgaggactttaaaatgacgattgataacctcggctggacgggcccgcgctacgacgattacacgtctgtggcatattggtaccagacggagccgaagccggtgccgtttacgctgccggaggacaaagagctgatcatggaataaaaggggtaggtgcattgaaaagagttttggtcggcggatttttggcgcttatcggctcgatatggggcgcggcgattttcattgcctgcggcatgaaccttgtaagcggttggtcaacgccgccgggacggtttttctcgaccgtctccgaggtcggcttgacgctgccgttggtgtttgcggtcatcgtgatgctcgttgggcttgtgattttggtgaaagagtattttacgaaagataaaaattaagaacagcttccgttttgggatttctccgaacggaagctgttttgtttttattatagggttactgtgccgttatttgatgcaaagagccggcgcatttcggcgcgcaggccgcgcagggcgggggagttgagttccgggtcgcgctcggtcaattctttagcgcactgctgcgcttcctgcaaaatttgcatgtcgtttaacatgtcggcaatctttaatttcggcaggccgtgctggcgctcgccgaagaaatcgcccggaccgcgcaggcgcaggtcttcgtccgcgaccttgaagccgtccgtggtgctgcaaaagagccttaaacgctgtaatgtttcatcgttttgcgcttctgtcaccagaatgcacgtggaggcgtatttgccgcggccgacgcgcccgcgcagctggtgcagctgcgaaaggccgtagcgctcggcgttttcaatcatcatgatgacggcattcggcacgtccacgccgacctcgacgaccgtggtggacaataataatttcgtgcggttttctgcaaaatcggtcatgacggcgtccttttccttcggcttcattttgccgtgcagaatgccgatgggcatgtcaccgaagtaatcgcgcacgatcttttcatacgccgcgatgcttgccgcgtcgctttcgccctcttcgataagcggacagacgatgtacgcctgtcgtccctcgtcgatgtgctttttgatgtacccgaacgcgcggcggcgctttggtgggtcgatgagatacgtttcgatgggctgacgacccggaggaagctcatttagaacggaaacgtcgaggtcgccataaatcatcagcgccaaggtgcgggggattggtgtggcgctcatgacaagtgtgtgcgggaagttgccctttttcgcgagtgcggtgcgctgattgacaccgaagcggtgctgctcgtccgtgatgacgagcgcgagggacgagaactccacgccgtcactgatgagtgcgtgcgtgccgacggcaagctgaatctcgccggtcttgagtcccttaatggcttcgcgttttgctttggcgcgcatgctgcccgtgatgagcaccgttttgatgccgcagagggcgaggagattggagagggactcgtaatgctgcgccgccagaatttccgtaggagccatgagcgccgcctgaaatccgttttgaatgaccgtgtggcacagcgccgccgccacggctgttttaccgctgccgacatcgccctgaatgaggcggttcatcgggtgcggaccctgcatgtcgcggatgccgtcctgcacggcacgctgctgtgcgccggtcatcgtgaaggggagcagggcggcaaactcttttgtataatcctttttgagcggatacggattttcgcgcacacctgcgcggcggatttccgccatgccgagctgcaagacgagcagttcctcgaacacgagtcgtctgcgcgccgtggaaagcgcttcgggcgaattcggaaagtggatcgttttgagcgcgtattcgaggcggcacagcgcgtatttcaggcgaagcgcatcgggcaacgggtctttgacggtctcagggagcaggcgcagggcttcttttaccgcgtttgcgatgatgcgagaggtgaggccgctcgtctgcgggtaaacaggcaccatgtcctgcatgcggctttcgggaacgaactccggggaggccatttcgcggcgcatgaacgtgcccgtcaccttgccgcgaaacgcgtagaccgcgccctccgtgagcagacttgtaatgtagcggttattgaaaaatgtcagctgcatgtcgtcttcgccgtccgtgatggtcgtcttgtaaagcgtcatgccgccgcggatacgctgctcgacaggacggcgcagcactgtgccttttacgatattcacttcgtttaagagtgtattgcggatgggcaccgcgtcgcgccaatcctcataagcgcggggatagagacgcagcagatcgcccaccgtgggcgcgccgagcttgcggaacagctccgcacgctttgggccgactccctttaaagacgcaatgtccgcttcaaataaagacgccatgaaacctccgacataaaacgaaaaagggcagggcataaagccccgccctaagctgctttgaaattattccacggaaagaatgaagtagtagaccggctggccgccgtttacgaggttgatgtccacaccgtcgcctgccttgttcttgatgagacgcagtgcttcgttggcttcttcctcggtgatgccttcgccgtaaatgagcgtgataaacgaggtgtgcttattcatcagcgcctttgcaaccttgtagacggaacgcaccggcgtgtcgccgacaaactcgagcttgccgttcgtcatgcccatggtgtcgccctctttgattttgaagccgccgaattcggaatcgcgtgcggcgaacgtgaccgtgccggtcgcgacgttttccgctgcagaaagcatggcagaagcgttttcgtctgcggaagcatccgggtcaaagcttaagagtgcggagagaccctgcggaatggtgcgggtcggtacgacgataatcttgcggtcggtgacgagcggcacggcctgttctgccgcaaggatgatgtttttgttgttcggcagtacgaaaaccgtctttgccggggtagcaagaacggcttcgacaatgtcctccgtgctggggttcatcgtctggccgccgctgacaacctgtgcacagccgagttcttcaaagagtgcacgcagaccgtcgcctgccgctacggaaataaagccgagttcctcttcgggggaaacgggctttaaggtctccttttcctctttactgacctgcgccgcttcgtaagccgcgcggtttgcgttattgagttcggcagcttttttgtgctgctctttcatgttttcgatttttacggtcaacagggaaccgaattccagcgcttttgtgagcgccacacccggctgttccgtgtgtacgtgcaccttgatgatctcctcgtcatcgaccacaacaacgcagtcgccgagggtttcgaggaacaggcgcagctcgttcggctcggtggtgacctccgggtcgcggccgacgatgaactccgtgcagtaggtgaagttgatctcgctgtcaaattccgccgcaacgcttgcaaagaactgggcggtctcctcggccttttcggcttcggtcatgtcggttttgacgatctcaccgtacttgaagacctgcatcatgccatcgaagatcatgcagagaccctgaccgccggcatcgacgacgcctgcttttttcagaacggggagaagatccggtgtggtggccagtgcttccgccgcgcccatgcagatggcatcccaaacataaatggggtcgttgtcgatctcggctgccgcagcgcctttttccgccgccacgcgggcaacggtcaaaatggtgccttcggtcggcttcataacggctttataagcggaatccacgccgatggcgagcgccgctgcgagctgtgtaccgtctgcttctacggtgtcctcgagacccttcgagaagccgcggaacagaagggaaaggataacgccggagttgcctcttgcgccgcgcagcatggcggaagccgccgcctttgcgaccttagcggttgtttcgttatccgcaagcgcctgcatggcgtcgctgcctgcaccgatcgtcatggacatattcgtgcccgtgtcgccgtccggaacggggaagatgttgaggtcatccacaaatttccggtttttcaatatgctgttcgcgccggagatgactgcgtcgcgaagctgtttacctgtaatcactgcatacacatcctgtctaaaaacgttcggaaggcgaaaagccggcttccgatagatatttgcatgtattttcaaactacactataccatagtttgcgggaaaaaacaagggtaataccgcacagaaatcacgtttagcgcagggagaaacgctctgtgctgcgggtgaggcctgttttttcatcgatatcgaacaaaatgcagtcgagcttgcacgggccgtccgcaaaatcgaaccgcacgggcattttgcttatctgctttttgatgacgagctccgctctgacgccgagtacggagttgatggggccggtcatgccgacgtcggtgatgtatccggtgcccttcggcagaacggtttcatcggccgtctgcacgtgtgtgtgcgtgccgaacacagcggagacgcggccgtctgcataatagccgaatgcgcgcttttcgccggtggcttccgcgtgaaaatccacgatgcagattttcggaaggtcgggcgtttttaaaagagtatcgagtgtgcggaacgggcaggcgaggtgctcgtcaaggtatacattgcccattaagttgatgacggcgatctgcgtgcggccgagatctaagacggtcatgcctttacccggggcttccggcgggaagtttgcggggcggatgacgcagtcgctttcatcgatataatcgtaaaattcgcggcggcggtaggtgtggtttccggtggtgatgatatccacgccgctatcgagcaggtggtttgcggaggcaggggtgatgccgttgccgtccgaggagttttcgccgtttgcgatgacgacatcgatgcccttagtgcgcttgaaggcggggagagtgcggcgcagaaagtcgcacccgtggctgcccaccacgtcgccgatacataatatctgcatataggggtcctttcttttagtcaatatgaaaatccagcgttttggcgtttctcggcaaatcttttgtgtattttaaaaagcttgtgacgcggcggtcgtattcgtccgtgaccgtaaagccgagcgcttttgcggtgcgtttggtgagctccgtgaaaagctcgcctgccttaaacagtgcgcgccaaatgtcttcttcggtgcatgcggcgaaggtttcaaggtagccgttccagatgtctgcggggagaagatcttttaaggcgtcaccgcatttgccggcgctgtaatcaaacccatgcagcgttccggcgtaccatttcatcatttgcagcagcattttgcgaatacaactttccatgtgcgtctgcgcaaacaggagctggccgcgccacagacccttggagacgtacggcgagacccaccagaactccgtgcggcagtcaaaaaacatacgctcggtcggatttttgacgtagtgcgtgctctcattcggctccggcagcttcggcagggcgttgtctttatctaataatacgacggaaaggcggtcgtcataacaatatacttcccagcggtcgatgctcgatacggtcaggtcgatgcggttgccgtccgcaaactgcatcagatagcatacgaactcgggaaagtgctctttaaaaagctcgctttcgtcggtgcgctcgcagacgaggatttcgccgaagtctttataataggctttttccttacacggagtaagatcgcacacgaggtacacaatgtcaaaatcattgaacgggtcgggcttacggttcgggttcgcacgggaaccgtttaagatgacggcacggatattttcctcggcatttgcatagccgaggatgaggtcatacatttctttttcgctgcgcataaaaactcctccgtattttataggtttattttaccgcaaaacgggctttttttcaatgttctttttgattttggctttgtaaaacccgaaatgttaagcagttttacgtggattttacacaagacttctttttgagtttacaaaacggccctatactttcgcttgtaaaccaaaggaaaagataaaaggcgagcagaaagctcccgaaaggaaagagtaatttatgaaactcagaaaaatcaccgcggttcttgcagccgcacttctcaccatgacagctatgacggcttgctccggcggcgcagcaagctccgcttcctccgagacaccgtcctccgaatcctccgctgcatctgcggagagcgcttcttctgaaagcacatcttccgagagcgcttcctccgaagaaacgaccggcggcgacatgaccggcgaaatcaccgttctttcccgtgaagacggctccggcacacgcggcgcattcattgagctgttcggcatcgagcagaaaaacgacgcaggcgaaaaggaagatatgacgacggatgatgcgcagatcacgaacagcacctccgttatgatgaccaccgtacagggcaacccgaaggccatcggctatatctccctcggctcccttgacgaaagcgttgtcaaagccgtggagatcgacggtgggcaccgaccgttgagaatgtaaaggccggcacctataaggttgttcgtccgttcaacattgcaacaaagggcgaggcaagcgaagttgcacaggacttcatcaacttcatcatgagcgctgacggtcagaaggttatttccgaaaacggctatatcaccgttgatgatgcggctccggcttacacggcatccggtgtttccggcaaggtggttgtcggcggttcctcctccgttacgccggtcatggaaaagctgaaggaagcttacatggcgctgaacccggacgttaccgttgaagtgcagcagagcgattccactacgggcatgacctccaccatcgacggtgcgtatgacatcggcatggcttcccgtgagctgaaagacagcgagcttgaagccggccttaccccgaccgtcattgcacaggacggcatcgctgttatcgtcaacaaggaaaacacgctgaccggccttacgagcgagcaggttttgagcatctacaccggcgaaacgaccgattggtccgagcttcagtaagaaacaatccataaaacgcaggagagccgggcggaaaggtccggctcttttcgcaagaaagccaataaagcagttttaaagtagttttgaaagtttgaaaggtgcgtgcaaaccgtgaagtggagcaacataaaagagcttctcatgcatatcctcttttttctcacagcctgcgtatcaatctttgccgttgttttgatctgcgtgtttctgtttgcaaacggtattccggccattggtaagatcggcgtgtttaaatttctgctcggcactaagtggaagccgggcaacgacatctacggcattctgccgatgatcctcggcagcctctacgtcacggcgggcgcaatcatcatcggtgtgccgattggacttttgacggcggtttttctcgcaaagttctgcccgaagggtctttataagattttaaagcctgcaacggagctgatggcgggtgtgccgtccgttgtgtacggcttcttcggtctcgttgttttggtgccgcttgtgcagaacattttcggtgtggcgggcaacacgatgctgacagcgtccgttttgctcggcattatgatcttgccgacgatcatcggcgtttcggaaagtgccattcgcgccgtgccggacagctactatgaaggctctctggcgctcggcgcgagccatgagcgcagcgtgttctttgcgacattgccggcggcgcgttccggcattttggcgggcgtggtgctcggcatcggccgcgccatcggcgaaacgatggcggtcgtcatggtggcgggcaacaaaccacgtatgccgcagggtttgctcgacggcgtgcgcaccatgacggcgaacatcgttatggaaatgggctacgccacagacctgcaccgcgaggcgctcattgcgacggcggtcgtgctgttcgtctttatcttaatgatcaacgttacgttctcgcttctgcgcagaaaagacagggcatgacccggaaaggatacggaaatgactatggaacgtacctgtaaacccgtggcggcagagaccatcaacaagctcaccttcaaggataaaatgcgcgcctataagcgctcgccgctttcgcttattttattgctgcttgtctgcggcgcggcgctcatcacgatgctgacgcttttataccttatcgtttacattcttgtgaagggcatcccgtatatcacaccggatcttttctcgttcacctatacatcggataacgtgtcgctgatgccggcgctgatttctacggtcgtcatgacgatcatcgcgctcgttattgcactgccgctcggcatcggcgcggcaatctactctgtggaatacgcaaagcgcggcaacaagcttgtgcagctcgtgcgcatcacgaccgaaacactttcgggcattccgtccatcgtgtacggcctgttcggctatctgtgctttgtgacggcgctgcactggggctattctttgcttgccggtgcgtttacggtcgccatcatgattttgccgctcatcatgcgcacaacggaggaggcgctcatctcggtgccggattccttccgcgagggcagcttcgggcttggcgcgggcagactgcgcacggtgtttcacatcgtgctgccgagcgccgtgccgggcattttgtccggcgtgattttggccattggccgcgttgtgggtgaatccgcggcgctgatgtacactgcgggctccgtggcgcagatgccgggccaggcgggcggcggtctgttcgattccgtgcgaaccctctccgtgcatatgtatgtgctttcgagcgagggcctgcacatcgacaaaacgtatgccacagcggttgtgctgcttgttatcgtcattggcatcaacgcactgtcctcgttcgtcgcgaagaaaattacgaagaaacagggctaaagcgagctttttagaaaatcacaccagaaaaagataggggaaacgatatgagctgtaaattggcaatcgaagatctgaatttgtattacggcgatttccatgcgctgaaatccatccatatggaaattcagccgaacgagatcaccgcgttcatcgggccttccggctgcggcaaaagtacgctgctgaaatccttgaaccgtatgaacgacctcgttgagggctgccggattaccggcgcagtaaaattggacggcgaggacatctaccatggcatggacgtgaaccttttgagaaaacgtatcggcatggtgttccaaaagccgaacccgtttccgatgagcgtgtacgacaacatcgcctacggaccgcgcacgcacggcatccgctctaaggcgaagctcgatgacattgtggagcgttctttaagaaacgccgccatttgggacgagcttaaagacagactgaagaaaagcgcgctggggctttccggcggacagcagcagagactgtgcattgcacgcgcgttggctgtggagccggaggtgctgctgatggacgaaccgaccagcgcccttgacccgatctccacctccaagatagaagaccttgcggtggagctgaaaaaggattatactatcgttatggtcacgcacaacatgcagcaggcggcgcgtatctcggacaaaacggcattcttcctgctcggtgaggtcatcgagtacggcgagacggagagcttattctccatgccgaaggataagcgcacggaggattacatcaccggcagattcggttaaggcttgcagaaaggaacgtgactacaatgagaaatcgtttggacgagcagctggagctgctcaatacagagcttatccgcatgggcgcactgtgcgaagacggcatttcgcaggcggcaaaggtacttgtgacacgagacgaagcgctgcgccgcgccgtggacgaaacggagcaggaaatcgaccgcaaggagcgcgaaatcgaagcgatctgcctgcgcttgcttttacagcagcagcctgttgcaaaagacctgcgtctcatctctgccgcgatgaagatgatcgcagatatggagcgcatcggcgaccaggcttcggatattgccgaaatggtcgagcatatccgcgcagaggtgctgccgggcagtctgcacattgccgaaatggcgcgcgctgccgtgaacatggtgacgaacagcgtcgattcgtttgtgcgccgtgacatggatattgcgcgcgccgtggaaaaagcggacgacgaagtagatgcgctttttaacaaggtgaaaagtgagatcatcgcactcatcgccgaaaagcccgaggagggcgagacatgccttgacctgctgatggtggcgaagtattttgaacgcatcggcgaccacgcggtcaatattgcggagtgggtcgtgttctcactcaccggcgagcacgattaagcggcaaagccgcacagaaaggatttaagggtttatgatctatcttgtggaggacgacgacagcatccgcgagcttgtactctatacactgcacaccaccggttttgaagccgagggcttccggaatgcggccgatttctggcaggcacttgaaaaagagctgccgcagctcgtgctgctcgacattatgctgccggatgaagacggtctgcatattttgaagcgtctgcgcgcgggtgcggaaacggccgacctgcccgtgatgatgctgacggcgaaaagcagcgaatatgaccgtgtggttgggctggacagcggcgcggacgattacctgccgaagccgttcggcatgatggagcttgtctcccgtgtacgcgcgctgctgcgcagggccgcgaagcccgcagcggaggataagctttttacggcgggctcgcttgcggtggatgtgaagcgccgcgccgttacggttgatggtgaacccgtgatcctcacgtacaaagaatttgaactgctgtgctatctgctggaaaaccgcggtgtggtgctttcgcgcgatcagattctcacgaagatctgggattacaattacagcggcgagacccgcacggtagacgtgcatatccgcacgctgcggcaaaagctcggcgatgccggtgcgctcattgagaccgtgcgcggcgtgggctaccggctggcacaggattaaagaggagaaagacgcatgaagaaaaagatcattttcagcatgtcgtgcattgcgctgctttccattttactttctatggtgctttccggcgtcgtttcgtactacgattcgctggaaatcgtgaaaaaggcgaccatagcggaaagccactacattcaaaacggcatcgcccttggcggggacgattacctttccgacatccgctccgccgggtatgatacagccgccgcgcagtctgtgcgcgtgaccgtcatcgatacggacggcacggtgcgatttgacagtgttgcagatgccgcaaacatggaaaaccacaacgaccgcccggaggtcattgctgcaagagaaaacggtgcgggggaatccgtgcgtgaatccgatacgctgaatgtgcagtcgtataactacgctgtgatgctctcggacggacgcgtgctgcgcctttcggtcggtatgaagacggtgttcggctccattgagcgcatggtgccgtggatgctgctgtgctccgtcattattctggtgctggccattttgctttccacgtaccgcacaaagcagattgtggcgccggtcaacgccattgacctggaccatccgatggaaaacgacgtgtacggcgagctttcgccgctgcttttgcgcttgcagcgccagaacgagaccatcaaggagaaaatggaagagctgcaccgcaagcagacggagtttaccgccatcaccgaaaacatgcgcgagggctttattgtggtggatgcaaagggcgatgtgctttcgtacaacacgagcgctgtgcgccttttggacgtgcacccggaggacgaccgcccacagagcgtgctggcgtttaaccgcagccccgatttccgtgatgcagtggattccgcgctgacgggtacggcgagcgagcgcatcacaaagctggcggggcgcagttacagcctcatcgcgaaccccgttacgaacgataacggcgtgcagggcgcggtgatcgtgctgctggacgttaccgagaaggaagagaacgagcgcctgcgccgcgagttcaccgcgaacgtttcgcatgagctcaaaacgccgctgacttctatttcgggctatgcggagattatgaaagacgggctcgtcaagagcgccgatgtgccgcgctttgcgaacaatatttataccgaagcacagcggcttatcacgcttgttgaggatattttgaagctttcaaagctcgacgaaaatgcggtagagcttggccgcgccgatacagacctttacgccattgcgcaggaggtggcctgccgtctgaaaatcccggcgcagcagaacagtattgtcatctcggtgcagggcagctcggcgttcgtcaccggcgtgccgtacattttagacgagatgctgtataaccttgcggataacgctgtaaagtacaaccgtcccggcggccgcgtggtgatctccaccggcacggaaggcggccacgcatatatgcaggtcagcgatacgggcattggcattccggcggccgaccgcgagcgcgtgttcgagcgcttctaccgtgtggataagagccgctccaagcagattggcggcacgggacttgggctttccattgtaaagcacggcgccatgttccaccatgcgcgcgtgtcgcttgaaagcgagccgaacaagggcaccacggtgcgcgtcactttctaaaataacgattaaatgcggtgcggaagcgagctttctgcgccgcatttttatttttgacattttgcgcggttgtgctataatacgagcagagcagcaaaaccgaaattcgggaggacggtatggttgaatttttgaaagaggcggcgcatgtggtgccgtctaaacgacagcttgattggtttgagatggaacgctatgcgtttgtgcattacggtgtaaacacctacacggaccgcgaatggggcgagggcacagaggacgagaagatttttaaccccaccgcgctcgattgcgaccagtgggtggaagcggtgaagtctgcgggcctcaagggactcatcctcacggcgaagcaccacgacggcttctgcctgtggccgagcaaatacacggagcacagcgtgaaaaacagcccttataagggggacgtcgtgcgtgaagccgcagaagcctgcaagcgcggcggcatcaagttcggtttttatctttctccgtgggaccgcaactcaaaatattacggcacgccggaatataacgattacttctgcaatcaactgacggaacttttgaccggctacggcgatattttctgcgtgtggttcgataacgcctgcggcgagggcgaaaacggcaaaaagcaggaatatgacttcccgcgttactttgagctcatccgcaagtatcagccgaacgccgttattttcaatgatttcggcccggatacccggtggtgcggcaacgaggccggagaggcgcgccatgccgaatgggccgttgtgccgagcgagctgtgtttttacagcgaggtgcagaccggcgcgggtccgatggcagaagacggctctttgagctacatgtacaacacgaaccgcgagattggcaccatgccgaacatcctctactcgaaggggcttgttttcgcaccggcggagatcgacatgtccattcgtccgggctggttctggcacgaaaacgaggaaccgcattcgcttgagaggctgtacaatacctacctgcgttcctgcggcgcaaacgcctgcctgaaccttaacgtaccgccgacgcgcgagggcaagttcgatgaacgcgacgtgaagcgcttgaaggagctcggcgacctcatccgcgagacgaccgaaaaccgcattccgtgcacggtggagcgcatcggcggcacgcccacgcagcccgtgtatgagctgaagaccgagaggccggtggagatcggctgcgttgtgctgcgcgaggatctcacgcacggtcagcgcgtggagggcttccgcattctcggcatcgacgaagaaaacaaggcggattacgcgttattcgagggcacgtgcatcggcaataagcacatctgcgagctggaagatccgttcgccgtgcagaatccgctgacgggccacacgaacaaaaagctttccggcgtgcgcgtacagattaccgctgcgcgcgacgaggtctttatgcgcgaaatttacatcacgaaagggaaaagcgtatgcgagcagaaataaagctgacggacgtgaaggacattcgcgatttgcacgagtatatcaacgcggaactgcgtctgcgccgcgttgcaccgacgttggaagctttgcaggcggcactggaaatgccgaaaacggaagcggaaattgagtttacggactacggcaaaatttccggtgcacttttagattatgtaaacaaaatgattgagatgatcgtgattgtcggagagaagaacccgaacgtacaggtcatgatcacaatgtgaaaacagaataccgataaagctcagagctgtgcggaaaacggaaaaatcgcaccccgttttcctgcatggctcttctttttttgacaaaaagacgcataaatatattgatttttactaattataattgaattctacaaaatatatttggttgacaataccaaaaattctgttatgattataaccgaagccacgaagcagaaaggcagggataagcatggagcgggcggaaaaagcgaaaagcccggaaatggaaacggcagggctgccgccgaatgacgtgaaaagattttatgtaaacggcaggcacctgctgcgggagatcgccgggctgtacgtgctgatccctgccggggagacggacgcgccacagaaccgcatcaccgcgctgaacgaaacgggacggtttttgtggatgcagtttcagcacccgtgcacggtggcagaagccgcagctgcggcagaggcgcagtacaccgggcagccggcagaaatgctgcgcggcatagaaaactttgtacgggcggggctgcgtgctggactgctgcgcgaggcttccgctgcggaaaaaacggaaggaaaggcggtataaaatgaaaaaagcatggagcgctccaatgctgcaaacggaggtgtttgaggcaaacgagtacatcgccgcgtgctacacgggcgtgtgcgatatttcgggagaggtgtttttggactcgaacggaaacggtgtgtatgaccgcggcattgacagcagaaagtactataacgaggcgtgcggacagcagtattccatcaccgggcaggattccgtgatgccggcgaagaacgcattcgtcgtggactggttcggaaatgcgacacctgtatggaactttgacgattaccatgtcaccacaacgctgacgcagaacgagcggccgaaccactcgtgatgcacccggagaaagacacagcggaagcgtttttactgcgccgcgccgccaaaacgggcgtgcccatcaccggcagttttgagctgaccccactttgtaacttaaactgcaaaatgtgttatgttcgtataaacaggacagagcaggagaaaatcagccgcctgcaaacggcggaggagtggacagcgcttgcggaaaagctacgcgacgcaggcacgctgtttttgctgctcacgggcggcgagccgcttttgtaccccgcgtttcgcgcggtgtatctcgcggtgcgaaagctcggtatgatcgttacggtgaacacgaacggcacgcttttgaatgaagactgggcggcgttttttgcgaaaaattcgccgcgccgcgtgaacgttacgctgtacggcgcaagcggagagacctacaagtcgctgtgcggtgacgagaccgggtacgcaaaagcaatgcgcggcattcagcttttgcaggcgcacggcgtgccggtgaaggtcggtgtcagcgtggtcaggcaaaaccggcatgaccttgaaacgttatttcaaatcacaaaggaacaagatttagagttggagccggatacttatatgatgtccacagaaagcggacagcatgaagcgcggctctcaccggaagaagccgcggccgcaagccttgccgcaacgaaaataaagcttggcacagtcggttttcacgaatatgcgcaacgcacggtacaggcgctggaaagcgctgttccggaaacggaagccggcatgcgctgccttgcagggcggtgttcgtttgccgtcggctggcgcggcgatttgcgcccgtgcgtgatgctcggggcgctttccgtgccgatcgaacacaacgacgtgcaggccgcttggcgtgcggtgcgggagaaatctgcggcgcttaaacagaatgaagcgtgcgtcgtgtgcaagctgcgtccgctgtgccgcgcgtgtccggcatcgtctttgcgcgagggcggcgcgttcggcacggtgccgccttatgtatgcgcctacacaaaagcgctctaccgcctgctgtgcgcggaaagcacagcgcccgaaattttgaagaaaggagagactgtaccccatgcacaggctctttaaattgggcggtttctgctttgcggcagatcaccccgatacactcgtttttccaccgaattttctgcgttttgaaacgaaagacgcgcagcctgcgtatttctacacgctgcgctttgtaaagagcatcccgaaccccgtcggcgtgtgcacggccgtgcgggaagacctcatcgtgtatcgcgacggcgaaaaggaatcgcggcttttgggtatacagggcatgcttggcttttacgcattgtatcgcgagctggacgacacgcacgccgaggtgatgatcgccgaagactgccgcggctgccttgtgtttgacccggtattcgcgtcgcttttcgcgcttgagcgccgcatgctgcaaaaggacagctttattctgcacagcgcctacatacgccaccgcggacgggctattttgttttcggcaccgtccggcacggggaagagcacgcaggcctcgctctgggcgcaatacgccggggcggagatcatcaacggcgaccgcgttttattgcagaaggtgcaggattgctggatggcgcgcggttggccggtctgcggcacgtcgggcatctgccaaaatgcggatgcgcggctgagcgccgtcgttttgctgcgacaggcgaaaaagaacgccgtgcgcaggctctcgcgcggggaggcatttttgcggctttacggacaggtgacggtgaaccgctgggatcaggcggaatctgcgcgtgtgctcgatgccgtggaagcactgctgcgccgcgtaccggcgtttttgctggattgtaccatatcggaagaagcggtcgactgcctgtatgaggcgctgtaccccgcgaccgtggcggagaccgtccgcctgcgcgcatgcttatagatgctgcggggctgcgcgcgtacatcggcgcgatcctttccgaaacggaagcgggcggcgtgatggaaatgccggtgttcggcagcagtatggcaccgtttctcatccacgggcgggacgccgtgcggcttgtaaaatgcacgcacccgccaaagcgcggggagatcgtgctgtttcggcggttagacgggcagtatgttctgcaccgcgtttggcgcgtgacgaaaagcgggtggtatctccttggcgacagccagaccgaccccgagggccccgtgcacggcgagcaaatttgctgccttgtccttgccgtgcgccgcaagggtaagtggtacggccgaaacagtgcgctgtggcggtttttcaaaatcgtgtggctcgttttaacaccggtaaggccgctttttatcgcgatgcttgcgcgccgccatgcccgaaaagaaaaggtgccaaatggagcgtaaagaaaacaaagtgcgcttttgcgcgctcggtgaggttttggcggactggaaatggctgctcacgtacagccgccgctgcaagaaaatgatcgcgctgtatatcgtgctcggcgtgctcggtaccacggtcggcctattcggcagcgtggcgggcaagtacctcatcgacatcgtcacggggtacgataccgcccgtctgccgcttttggttttcgcggctattggcagcacggcggtctccatcgcgttcgactgcgtggtgagccgcgtgctgaaaaagctggagattgacctcaataacaacgtgcgcgccgatgtgttcgaccgcattttagacgcggactggcaggcgctgcacgcgttttcctgcggcgacattttaaaccgctttgaaacggatacgggtgctgtgggcggcggggcagtgagctggctgccgcaaattttagtgacggcttacaggctgtgcgcggtgtttttcctcatctggatttactgccccgtgatggcgctcatcgcgctcggcggcgcgccggtggtgttgctgctgtctgccgccgtgctcaaaaagcggcgggcatttgaaaataagctgcgccgcctcggcagcgaaatgaccgcgtttgaagcggagacgttttacacggtcgacacggtgaaatcgctcggcacaatgcaaagccaaagccgaaagctaaaggaaaaacaggaagcgctgcgcacatgcagtttgcaatacaacatgttttccgtgcgcgtgaatgcgcttttgcgggttgcgggggcgttcacgcagtttaccgccatgggctacgggctgtatttattgtgggcgcgcgccattacattcggtacgctgacactttttttgcagcagcgcagcagcctgacaagtgcgtttgaaagtgccgcagggcttatcccgaagtttttgagcacggcgatctctgcacaccgtgtgcgtgagctttgcgagctgccgaaggagcgccacggtaaaacggcactgccgcagggcgcactgatggtagagctcaaaaatgtgacagccgcataccgaaacggcgaagcggtgctgaaaaacgtatcgtttgcggcagggccgggggagattgccgtgcttgttggcacatccggcgcggggaaaacgacgctggtgcgtgttttgctcggactcgtttacccggaaagcggacgtgctgtgctgcgcgggaagaatggatgcgaaatcgtcatcagcgcggagacacgctgtgcgttttcgtatgtaccgcagggcagcacgctgttttccggcacgattgcggagaacctgcgcatggcaaaagagaacgccacggaggaggaaatgacagcggcgctcaaaaccgcctgcgcatgggcgtttgtgtcatcgctgccaaacggcgtgaacacgaagatcgcggagcacggcggcgggctttccgagggacaggcgcagcgcatcgccatcgcccgcgcggtgctgcgcggcgcgccgatcttgctccttgacgaagcgacctcggcgcttgatgaaaagaccgaagcgcaggttctgaaaaatcttttaaccgcgctgccggacaccgcgtgcattttgacgacacaccgcccgggcgcgctgaaatactgtacgcgcctgtacaaagcggaaaacggcgcgctgacgtgcatagaagtgaacaaacccgcctgaaagacgttttaaatgcgtttttcggcgggctttgtttatgactttaggcgggcttttgccgaacgcgcagtcttttctgcgcgtgggtgaaaatgcttgggcattttgaacattgccgttttggtcgtaattccttataataaatgtgcgtattttgaaaagagaagggaaaacggacatgaataaggacttaacgaccggcaagccggcaggtgttttgctgcggttcacgctgccgatgcttttgagtgtggcgttccagcagctttacaatattgcagacagcgtcatcgcgggcaaatttgcgggtgaagacgcgttggcggcggtgggcgcttcgtaccccgtgacgatgatcttcatggcggtcgcgttcggcatgaacatcggtatttcggtcgtcatctcgcagcttttcggcgcgaaggattttaaagaaatgaaaacggcggcgtatacgggctttatttctgttgcggtgcttggcgtggtgctcacggtcgtcggcacggtgctgtgcgagccaatcttacgcatgctcggcacgccggagaacatcatggaagatacggcgctgtaccttgctatttacatttgggggcttttgttcctttttatctacaacatttcttccggcgtgttcacgtcgctcggcgacagcaaaacgccgctgtggtttttgatcgcgtcgtccgtcggcaatatcgtgctcgacgccgtgttcgtcatcatattccactggggcgtcggcggcgtagcgtgggcgacgttcctcgcgcagggcgtggcttccgcgtgtgcgttctgggcggtcttgcgccgcttaaagtccattgagacaaaagaaaagcctgcgttgttttccggtgcgatgctgcgccgtatttcgatcgtagccattccgagcattttgcagcaaagtttcgtttcggtcggcaatttgtgcattcagggacttgtcaacggtttcggctcctccgccatcgcgggctattccgcaggcgtaaagctcaacacgttcgccaccacgtcattgacggcgctcaacaactcggtttcgagctttacggggcagaatatcggcgcaggcaaaatggaacgcgtgcgcagcggcttcaaagcggggcttgtgatatcgtttgccgtggcgctcgtctttatgggcgcgtatgtgttctgcggcgaaaacctcctgctgctctttatgaatagcacctcggcggaggccatcgagatcggcaaaaaatttctgcttattgtctcgctgttctacctgttcctcgcattaaagcttgccgcggacggcgtgctgcgcggtgcgggtgcaatggtatattttatgattaccacgttcttagacctcattctgcgcgttgttctggcgtttattctggtgcatccgttcggcatcacaggcatctggctttcgtggccgttcggctggataatttccagtacattgtcgctcgcgttctatcttttgggcgtgtgggacccgctgaaaaagaaagcataaacggcaaaaagccttacaccaagctcaaaaaagagcaaggcgtaaggcttttgttatttcattgcatttcggctcgcttatgcgtgacccgtcacgcgcagatagtccgcataggtgccgtcgaaaacgttgatttttcggttttcgagcacgacgatcttcgtcgcaagtttatcgatgaaatagcggtcgtgcgaaatgaacaacaaggtgccggagaactccaacaaagcgtcctcaagcatctcacgcgtttcaatgtcgatgtggttcgtcggctcgtcgagaatgagaaagttcacgcggttctgcaaaagaacggcgagctttaacaacaccttttcaccgcccgaaagagaagagacgcgcttcatcaccgccgcgccgcagaagtaatactttgctaaaatttgccgcgcttcgccctcgccgcaaacacactcgcggcggaatgcttcgagcacgctgtccttgtcgtttaaaaagcgaatctcctgcggaatatacccaagctgcgcggaggggttgaacttcgctgtaccggaaaatgggacatccccgaaaattgcgcgtaaaagcgatgttttgcccgtgccgttcgcgccgagaaacgccatgcggtctttttcctccacaagcagctctgcctgttcaaacagcgcggtcttgccgaacgaaagggagaaacccgtaagctttaaaacctcgcgcccggtgcggtcgcccgcaaagcgcatcgggattttgggcttttcaagctgcgggcgctttatcatctccattttctcaaggcgaagctccagcattttggcgcggcggaagaacttcggattatccgcctgcgcgccccactcgcgaaaacgtttgatggcggctttcattgcttcaatctgtttttgctggtttttgtactgctcaaattcgaggagcatttggcgttcctgctcctctttcgcagccgtgtagccgccggggtagcttgtgcagatgccgtcctctaaaatgagcgtgcgcgttgccacacggtctaaaaaccggcggtcgtgcgagaccattaaaaccgtaccgcggtattttgcgaggaagccctcaaaccaatcgagcgtttgcatgtcgaggtgatttgtcggctcgtcgagcagcagaatatccggctcacgcagaacgacggcggcgaggttcacaacggtcttctgcccgccgctgagcacattatacggtcgctcgagcaggctgttcagcttaaacccctgcacgatgtttttcagccgcgtttctgcgtcatagccgccaagcgccgcatatcggctttgcgcctcggtgtatgcgtcggcatagcgctcgaaatcctccgtcatcttttcttccagttcgcgcagcttcgcttcaacggagaaaacttccgcaaacggctcgcaaagcacgtcgtacacggttgcgtctttgccgcgcaggcggggaatctgttccaaaagcgcggtgttcgcaccgcggcgcagggagatttcgccgctgtccgggctttcttcgctcgcaagcagctttaaaatggtcgatttacccgtgccgttgcgaccgatgagcgcggcgcgctcgccggtcatcacttcaaagctcaaatcttttaagacgggcttgaagccgaaatttttatttacatgtgaaaaactgaattctgtcatttttatcgctcctgtttttgaattgatttgtacattcaaaaaagcaggccgagacagaatacatcaggcgatccaaagaatcgctccgtacaaatggatagccttagtctctgtccatagagcctgcacggagcacatcgccagtgattcggaagcaaaatgcccgatagttgatccgaatcatacactcaccgtcctttcgtgcgcgaaagcgctttacttttaccagtatagcgcacaaaaacggacttttcaagaagaattaatacgccacggcggaaagcggagtttaagttgatttttggcggcaaatccgctataataatataagataacaggcaccttaggcgtgctttgtgtgggacgccgaaaacaagggagcaaaagccgctaaaacagcataaaaaggcttttgcagccgtcttaactttagggaggaagatcacgatgccggaagtttacaccataccgctttccaagatcattcacgagttacagcttgagaccgcttttctgccgaagagcgccgatgatattttgattcaatcgagagacgttgttcgccccggcatggagctgaacggctaccacgaatattttgacccgaatcgcatcgccgttttaggccgtgcggaaatgtacatgctggagagcttaaagccggagcgccgcgccatggcgctggacagctacctgtctctgaagccgccggcagtgattgttgcccgcggtattgaccccggcaaggacttcatggagattgccgaaacgtaccacgtgccggtgctgcgcacgacggagtcgacctcaaatgttgtcgcgtcgctcgttgcgtatttgaacgtcgagcttgcgccgcgcatcacacgccacggcgtgttggtggaggtttacggcgaaggtattctgcttgtcggcgacagcggcgtcggcaagagcgagacggccatcgagctcatcaagcgcggccaccgtctcatcgcggacgatgcggtggaaattcgccgcgtatccagcaaatcgctcgtcggtcagtccccggagaacatccgtcacttcatcgagctgcgcggcatcggcatcatcaatgcccgtcgcattttcggtatgggcgccgttaagctgcaggagaaaattgacatgtgcatcaacctggagatctgggacgcgacgaaggtctacgaccgcatgggcatggacagcgaatacacggaaattctcggcatcaaggtgccggtgatgacgatcccggtaaagcccggccgtaaccttgccatcatcattgaagttgcggcgatgaataaccgccagaagaaaatgggctacaacgccgcctacgagctgctctccgcgctcggcatggatgcttccatgatgccgcacgaggagattaagagagatttggatatttaacagcatgattttagtataaaacaagatgttttggcatcttgttcaggatccccctttgatagggttttctgcggtcggacaattcaccggattgtccgatctaccttcctgatcttttggtaggcaaaagggtttcgctttctgcggaaagcggcttagggcgctgccctaagaacctgtaaacttcctgaagaaagttcaatcaaagacttttaaccgcgtttaaggttagctgaaagtgagaaaatatcatcatgtataacatcattgcagatttgcatacacattcgctggcgtctacgcatgcgtacagcaccattcgcgaaatggtcgattccgctgcggaaaagggcctcaaagccattgccatcaccgaccacgcccgcaccatgcccggtgcgcccggcccgtggttctttaattccatgcatgaactgccgcttttataccgcggcattctgctcattgcgggcatggaggcgaatgtcatcgatttgaacggcacgctcgacatcaatgagacagaacgccgcgacgtcaactggcttgtggcgtccattcacaacctcggactgccggggcttgagaatcccacggtcgaaaaatgcacgcagctttggctcaacattgcacacgatccgaaggtgaatgttatcggccacagcggcagtccggagttccgctacgattatgaaacggtcattccggagttcggtcgaaaccacaagcttgtggagattaacgcgcattcctttgaggtgcgcaaggcgaatatcccgaactgccgcgagattgcgctgtgctgcaaaaagcaccgtgtgccgattatcgtcagttcggacgcgcattttgagacgcaggtgaaggatcacactgcggcgctcgagatgctgcgcgagattgcgtttccggaggagctgattctcaacgcgaacacgaaccgcctcatcgagtatctgcgcgcgcacacgaacatccttgaaaaccgcaaggatgccgatgctattttaaggagctttgagaatgtctgattaccgtaaatttgacgccgcactacaaagtgccggcgtatgctataagaccgatgagcccatgtccgcccacacgtcgtttaagatcggcggcccggcggatcggtttgtcgaagtgaagaccgtctctgaattgcaggcggttttaaatgctgtaagcgacgagaatgtcccgtatttcatcctcggcaacggttccaatctgcttgtgccggacgagggcttgcgcggcgcggtgctgacgctgcagggcgattttaaaaaagtgcagagccttgcgaacggtcatgttttgtgcggcgcgggtgcatcgcttgcgacggtatgcagctttgcacgtgggcaggggctcacgggccttgaatttgcgtggggcattccggggcagctcggcggcgcagtgtacatgaacgccggcgcctacggcggcgagatgaagcaggtcgtcgtacgcgtccatttccttgaagcggacggcacgcccggcgtaatgagcggggaagacctcgcgttcggctaccgcaaaagcgcctttatgggcacgaagcgcatcatcacaagcgcggagctgtgccttgaaagcggtgcggaagcggagatcaccgcgaaaatggaagatttcatgcgccgtcgccgcgaaaagcagccgctcgagctgccgagcgcgggcagcgtattcaagcgcccggagggttattttgccggtacgcttattgaacagtgcggcctgaagggctttgccgtgggcggcgcgtgcgtcagcgaaaagcatgcaggcttcattgtgaacaaaggcggtgcgacgtgtgccgatgtggaagcgctcatccgcgccattcaggatacggtatttcaggcgaccggcgtggagctggagccggaaattcgccgcatttcgctcagcaagtaaaatttgtgggatttacggtggcatttggctgccgaaaaggtggtttttaaaatggaatttgtgatcttgaccggtttatccggcgcgggcaaaacgcgcgccatgcacgccatggaggatatcggcttttattgtgtcgataatctgcccccggcgctcattccggtcttttacgatctttgcgataaatccgagggtattcagcgccgcgtggcggttgtcacggatacccgcggcggcgagctttttaagtcatttttcagcgcgctcgaaacactgaaggcgcagaacgagccgtataaaattttgtttatggatgcgtccgagcccgtgcttgtcaaccgctttcaggagacgcgccgcaagcacccgctttccgaagcgatgcagggctctttggagcaggccgtgcgcctggagcgcgagatgctgcgcccggtcaaagaggtctccgattacgtcatcgatacgtcgaacattccggcggcggggctgaaagcgcgcatttccgacctgtttttgcagaacgacaacgacgccattacggtgcattgcatcagcttcggctttaaatacggtctgccgctcgaatccgatcttgtgtttgacgtgcgctgcctgccgaacccgttctacgtggaggagctgcgtgaacataccggccttgaagcgcccgtgcgcgactacgtgatgaactgcaaggaaaccgagggctttaaaacccgctttacggacatgatcgattacatgctgccgctctacattcaggagggcaaaagccagctcgtcatcgcggtcggatgcaccggcgggcatcaccgctccgtggcgcttgcgcagtatatgcacgatcaccttgtcgcaaacggcgttcacgccacggtctcgcaccgggatatcacgaaacaataaagcgggagggagccgttttcatgtcatttgctgcggattgcaagcaagagctgtgtatgattgaaaataagcgcgcgtgctgtttgaaagcggaatgctacggccttctgcttttttcaaagtgtttttccgcgcgggaatcgcagatggtatgcgaaaatgccgccgttgcacgccgtgtggcggaggccgccgccgtttcggccggtgtatacgccgaggtgcgctcgcagttaaggcgcaagaatatcggcgcgtatgccatcaccattccgggtgaagccgcacgcattcagatgatccgttcgttcgggcacgatgagaatgacgtgaacctgcatattcatgaggaaaatctgcaaaaggactgctgcatttcggcatttctgcgcggcgtgttcctcatctgcggcacggtcacagatccgcagaaggagtaccaccttgagttttccacgccgtacctgcaccttgcggaagaccttgtgactgttctgcaccgcgtgaaggccgcgcagctttcgccgtccattgcacgcagaaaaaacagctacattgtctacataaaggaaagcgccgccattgaggatttcctcacgctgacgggtgcggtaaactccgccatgaacctgatgcagatcaaaatgtacaaagagacctacaacaatttaaaccgtgtctcgaactgcgagaccgcgaatcttgataaaacgtactctgctgcaacaaagcagattgccgccattgcgctcatcagcgacaaggtggggctggacgagctgcctgccgacctgcgcgaggccgccgttttgcggctggaaaaccccgaaatgtcgctgcgcgaaatgggggagcggctttccatcagccgttccggtgtgaatcaccgcctgcgccgcattttggagtttgcggaacagctcggttcgccggaggaatcccttgcggagcagagcgtttttgaagtggaggaaaagctgcatgctgaaaatgcaaagaccgaagagctttaaagaccttgtgttgggcattttgattgttgcggtgctcggcgtgggcgcgtatttcatcgcagatgcgctgaaagccgagcttgtgcccggcgatatcgtagtgcgctccggcaatgaagagattaccgcgctgcagaacgtgaccggcgagcaaaggaagaacggttcaaaagcgtgcggagggcattttgaaattgaagaggttgccgatgaattcccggtcattcgcatggataaaggcatcgtgcttgaagcctcgcaggatccctacggcgcaatgtattacacggtctataacgaggatttctccgagctttactaccgcagcgagcggtttgcgtaccctgaaaacgacggcacatactacgttgtgatcgataccgcgtggggagataaaaaccactatttttccaccgagcacggatttacccttgtgattgaaaatagcaattagatacttatgtaaatttaattatgtaaacttaaatggaaaaggagggcgaaaatggcgtttacacatttgcatgtgcacaccgaatacagccttttggacggcgcttgccgcattgaaaagctgctcgatcaagcgcagaaaatgggtcagaaaagcgttgccattacggatcacggcgtgatgtacggcgtgatcgacttttataaagcagcgaaaaagcgcggcatcaagccgatcatcggctgcgagatctacgttgcaaagcgcagccggttcgataagattcacggcatcgataacgaaaaccggcatcttgtgctgctgtgcaaaaacgaaacgggctaccgcaaccttgtcgccattgtctctaaagcgtggacagagggtttttacagcaagccccgtgccgatatggagctgctgcgtgaacacagcgaggggctcatcgcgctttccgcctgccttgcgggtgagatcccgcgtgcgctttccgtcggcgactatgacgaagcaaaagccgccgccctgcgctaccgtgagattttcggcgaggacaatttttacctcgaattacaagaccacggcctgcgcgaacaggcacatatcaacccgcaaataatccgattgtcaaaagatacgggcattccgctcgtcgtgacgaacgactgccactatatcgaaaaagaagacaccaaaatgcaccacatcctcgtctgcatccagacgaaccgcacggtggaggatgaggatacactggaattcggctccgatgaattctattttaaaagcgaagacgaaatgcgtgcactgttcccggattgtcccgaggcagcggataatacgcagaaaatcgccgaccgctgcaatgtggaatttgagttcggcaaaacgaagctgccacactttgatacgccggacggcagcgacaaccgcgaatatttccgccgcatgtgttacgcgggtctgcacaaatactacggcgaaaacccgaaaaaagaaatcgtagaccgccttgaatatgaaatttcgacgattgatacgatgggttatgtaaactactacctcattgtgtacgatttcatccgtcaggcgaaaagcatgggtatcccggtcggcccgggcagaggctccggcgtgggcagcctcgccgcatactgcatcggcatcacgggcgttgacccgttgcggtatgacctgctgttcgagcgctttttgaatccggagcgcgtcagtatgccggacttcgacgtcgatttcagcgatgagcgccgacaggagatcattgagtatgtcacggaaaaatacggcaccgaccatgtggcgcagatcgtcacgttcggcaccatggcggcgcgccttgcgatacgcgacgttggccgcgccatggcgattccgtacacgacgtgcgataccgtcgcaaagcttgtgccgatggagctcgacatcacgattgatgccgcgctggaacgcgtctccgagctgcgcgatttatatgaaagcgacaaacaggtgcacgagctcctcgatatggcacgcaaaattgagggcatgccgcgccacacgtctacgcacgccgccggtgttgtcatcacagaccgcccggtcgtcgattacgtgccgctgagcatgaacgacgattcgcccgtcacgcagtacacgatgacggccatcgagcagctcggtctgctcaagatggactttctcggcctgcgcaacctctcggttatcgaccacgccgagcagatgattgcgaaacacacgccgggctttaaggtggaaaacgcgccggataacgacccggacgtgtttaaaatgatcgcgagcggtgcgacagagggcgtgttccagtttgaatccgccggtatgcgccgtgtcatcatgcaatccgaccccaaaagcattgaagacctcatcgccgttatctctttgtatcgccccggcccgatgaagttcatccccatgtacgtcgaaaatcgcaagcacccggataaaatcacgtaccgccacccacgcctttccaaaatactggatgtcacctacgggtgcatcatttatcaggagcaggtcatgcgcattttccgcgagcttgcggggtattcgctcggccgcgcggacattgtgcgccgcgccatgagcaagaaaaagcacgatgtcatggagcaggagcgtgagtatttcattcacggcttaaagcgtgaggacggcaccgtggagattgaaggctgcatcgcccgcggcgtggacgagcagaccgccgagacaatctacgatgagatgaaaagctttgcgtcctacgcgtttaataagtcccatgccgccgcgtatgccgttgtggcgtatcgcacggcgtacctcaaatatcactatccgaaagaatacatggctgcgttgctcacaagtgtgcttgcatccgcaggcaagattgcggcgtatatggaagaatgcagcaggctgaatattgccgtgctgccgccacacgtgaacgagagcgagcagggcttttccgtttttgaaaacagcattcgtttcggtttgctcgccatccgcaacctcgggcgcggcctgatacagcgcattttgtccgagcgcacgatgaacggcccgttcacgaccttctacgatttctgcaagcgcatgcagggcagagacctgaaccgccgcgccgtggaaagtcttatccgctgcggtgcgttcgacggtctcggcaataaccgccgcgaaatgctgatggcggtcggcccgctgctcgatcagctggaggacgacaaacgccgcaacatagagggacagatcggcctgtttgacttcggcggggaggagaaaacggaatctttcgagatgccgaaagccgaggagttccccaaaaccgaactgctttctatggaaaaggaagtcaccggcatgtacctttccggacaccccatgtcgccgtatgcggaggtctataacgccggcatcgccgcgcgctttgatgagattgcccgcagcgccgccggggaatccgaccaatataaagacgagcagtatgtggacgttctggccgttgtggaaagcgtgaaaaagaaggtgacgcgctccggctctgccatggcgttcgtcacgctggaagacatgtatggctctatggaggcgcttgttttcccgaaggttttggaaaaatacggcgacctttttgcgccgggcggctctgtttgggcgcacggacgcatcagctttacggaagaaaaagacccgaagttcatctgcgaatatgcctcggcaccgttttcgccggaagaaatgatgatccgcagaaggcctgcgcctgaggaaaagaaaagggactcgcaaaagcctgccgctgtgccggaaagcgtcacgccgccgcgcggggaagagcggcccggtgtgcagattaagggctataacacagcctataagggcctttacctgcgtgtgccgaacgccgaagacccgctctgcaaaaaggcgatgcagtacatcgagattttcgacggcgtgaccgacctctatctatattatacggacacgaaaaagctggtccgcgcgcccgcccgttaccgcgttgcggtgaactacgaactcgtctccgcattgagaaaacttctcggcgagggaaatgttgcgctgaaagaataagaaattctcaaaaaaacaaaaaccgattcaaaaaagacaaaatacctcttgaaaccgtcagggaaaaggggtataatcaaaaaatgaatggaataaattgttgaattgcatttttaactttgcagttttcaataagaaagtggaggaatttacaatgtgtgcaaagaaaatcgcagtacttacgagcggcggtgacgcaccgggcatgaatgctgcggttcgtgctgttgtccgcaccgcgatctccttcggcatggaggtatatggcgtacgtcacggctacaacggtcttctgaccggcgaagtgcagaaaatggagcttcgcagcgtttccaacatcatccagcacggcggcacggcgctctttacggcgcgcagccccgagttcaataccccggagggcgttcagaaggcggctgctaaatgtcgcgaactgggtatcgacggcgtggtcgtcgtcggcggcgacggttctttccgcggcgcacgcgacctgaccggcgcaggcgtaccttgcatcggcgttccgggcaccatcgataacgatatttcgagctccgaatataccatcggttatgacacggcgatgaataccgctatggaaatgatcgaccgcatccgcgataccacagagtctcatgaccgctgcagcgttgtagaggtcatgggcagacgctgcggcgacatcgcactcaacaccggcatcgctgtcggtgcaatcgcaacgctcgtcccggaagtgaagtatgactttgaaaaggacatcatcgagcgcatccgctacgcacagaagaccggcaagcgccacttcatcgtggtcgttgcagagggcgtaggtcactccgaagatatctgcaagcgcatccaagaggagaccggcatcgagagccgtgcgaccatccttggccatgtacagcgcggcggttccccgacgctccgtgaccgtgttgtggcaagccagatgggctaccacgcagttgagctgctccgcgacggcaagagcaaccgcgttgtcgtcatgcagggcgaacgcatcgtggacttcgacattaccgaagccctcgagatgccgcgtgtcttcgacgagaagctctacaagatttctcaggatctttcccgctaaagttaagttaccgaaacgcctgttccaaaaggacgggcgtttcctgtttttcggcacggtgtctgcattttttgcataaagcaccttgtcgggggtaaaaaataattatttttgggaaaataggttgacattttccgcagttcgtggtagaataatcgagcggtcgaaaagaggccgtgagataaataggggcatagctcagttggtagagcagcggtctccaaaaccgcgtgccgtgagttcgaatcttactgcccctgccaccatggcccggtagttcagttggttagaacgctagcctgtcacgctagaggtcgacggttcgagcccgttccgggtcgccacaaaaggcgagttcatcttgccttttgcgtatgctgctatggctcagtaggcagagcacgtccttggtaaggacgaggtcaccagttcgaatctggttagcagctccaagaaggactttgcagaaatgcagagtccttttttgtttgtgttttcgagaggtcatacagtcaaaaaaagtagtcggcagtatatcgtttttgaagaaaaacggcctttttgcgcctattcataatttcgacttgaaatttaccgtatttctgctataatctttatagttttccctttatgtttatgcttaaaaagcagcggccaaactgccagaaaattgaaggagcagaggattatgagtattccggaaatggacatgaacccggagatcgcccgaaagttactcgaggtcggcgaagaattccgcattgaaggcccgttcttctcgtacgaagaaatcaaaatgggcaacgtgaaccacacctacaaagtcaattatattcgcgatgacggtaccggcatggcaaagattaagtctttccttgtacagcgcgtcaatacatatgcgtttcagcacccgattgagctgatgcagaacattgaccgtgtcacggagcacatccgtgaaaaatgcccgaatacgaaaagcctgcatttccatcacacgaagcacggtgtcaactatttgatggataatgacggcttctggcggctcagcaactacgtgccgtctgtgacgttcgatacctgcgacgacctgaacgtggtgcgcagtgcaggtgaggcgttcggcgatttccaactgatgttggcagatttcgatgcgaactcccttttctacacaatcccggatttccacaatacgcgcaagcgctatgagaagctgaaggaagacatggctgccgacccgtgcaatcgtgtggcagaggtgcgcgaagaactcgattggctgctttccgtagaggacgaggcttgccgcctgaccgacctctttgaaaaaggcgagcttccgctgcgcgttacgcacaacgatacaaagatcaacaacgtgctgttcgatgagaagacgcacgaggcgctcgttgtcatcgatctggataccgttatgccgggccttgtcggccacgatttcggcgatgccatccgcttcgctgcaaattttgtggaagaagattgcgattatccggaaaaggccggcgtaaacctcaatattttctgggcatttgccgagggcttcctcaaaaagaccgccgcgtctctgacgaaaaccgaagtggatacgctggcgctcagttgctttgcgcttacctgcgagcttgcaacgcgcttcctcgcggactacatcgtcggcgataagtactttaaggtcaaaaagccacagcataaccttgttcgtacgcgctgccagattgcccttgcaaaggacatgctgaataaaatggacgcgatgaacgccatcgtgcaggactgcgcacgccgctacaaagagaccgaaaacgcataattcattttgcatccagacgacccggcagctttgtcgggtcgtttttaaaaccagggaggagtttatcatgaaaattctgttgaccggcgcaaatggctttgtaggggcacgcatccgtgcggcggcgcccgttatttgtgcgccgtctctgcgcggggcggaaaaagaggatatcgaccgcctcatcgacaccgtgcaaccggacgccatccttcacaccgcggcaatctcggacatcggtgcgtgtgccaaagacccggaaggatcataccacgcaaacgttttggtgccggagtatttggccaaagccgcaaacggtgcgaagctcgtgttgttcagctccgatcaggtgtacagcggcgcaaagggcgataagccgtttacggaagacgacgttgcgaccgcaaatctctacgccgaagagaagttggaaatggaaaatcgcgttctcgcgatcgacccgaacgccgtcatgctgcgtgcgacgtggatgtatgacatgcccatgttcggcgtgccgaaccgcagcaacctcatcacgatgttcctgaacgccgccatcacccaaaagccgcttgcactttccaaagaggaatttcgcggcatcacctatgtgcgcgaggttgcagagcagaccttgcaggctgtgaatttgcccggtggcgcgtataacttcggcagtgaggcagacgtctccatgtacgcgcttgcggagctgtttatgaaaaaaacaggcatgaagctcaatttgcaggaaaagtccggcggcgaaaacctctggatgaattgtgcaaagctcaaaaatgccggcggtggatttgagacgactgccgaaggccttgcgacgtgcatggaggactataatctttcgctgctcggccgataacaaaacgaaaatctcctttgaagcccggttttatgggttcttcaaaggagattcttaagtgatcgaaatctaattatgtcaatagctttatgtaaactaaattatgtaaaattaaagaaatttgtcgagcgcatgggcgcgttcacaggccgcacgcaccagttccggctgcatgcgcagcacgccgagctcgcccacgacctccgcagagctcgaaatccttttgtctcacaacagatcagaaagataggctaaatggtccggtgggctgtttagccgtaagaaaccctatcaagaggttccttaaaaagacatgaagaatgcaaaaagccacaagctcaaaagtgtcatttaaacctccttcggcataacttgtacaaggggcaagtccccgaaaacaaggaggggttttatggcatcttttacaaatttcgcgacgctttcgtataacggaggcacaacgaattccaacaccgtcacgggcgagcttttggaggccttgaccgttaccaaaaccgccgtggtgaaaaattacgccgcaaacgataagattacgtatatcatttctatcgtaaacagcggtgcgcagccggtgacaaatctcacggtcaccgataacctcggcgcgtatgaatttaatagcgggaccgtctatccgctcgcgtatgtgtcgaattctgttcggtattatgtaaacggcgtcttgcagaccgcgcccaccgcaacgtcggagccgccgctcgtcattacggtcccgaatgtccccgcaaacggcagcatcatgctcgtttacgaggcagaggtcacagcgtatgcaccgctcggcacggacggcagcatcacgaataccgcaaatgtcacggacggcaatctggaagtcagcgcgtcggaaacggtctccacggaggatcgcgcggttctcaccatcagcaaagcgctgtgtcctgcggtcgtcacggggaacgggcagattacgtatacgttcgtcatcgaaaacacgggcaacaccgaagcttccgaagccgagcgcatcgtgctgaccgatacgtttgacccgatcctcaaaaacattgcggtcacgtttaacggcaccgcttggacagcaggtacgcagtacacgtatggcgaaacgaccggcgtgttcgcaacgcttccggggcagatcaccgttcccgccgcgcagtatacgcaaaacgaaaacggcacatggaccactacacccggcaccgcggaggttgttatcaccggcaccgtgtaaagccaaatttaacaggacgcatagcgtagatatcctccggcttttcgccgggggatattcatgctttgtgtcgttttttaacaagcgattttacatggattttacaaagaacacacagttgatttgacatagacacgatatactcctatacgtgtaaaagaatgttaaaaggggaaaatcgagtatggatattttcaatgtactgacgatgatcggcgggctgtgtcttttcctgttcggcatgaacctgatggggcaggccttggagcgccgcgcgggcggcaagctgcaaagcttgctcgataaaatgaccggcagtgtaccggcgggctttttgacgggcctcggcatcacagccatcattcaaagctcgtcggcgacgacagtcatggtagtgggcttcgtaaactccgggctcatgacactgcggcaagccatcaatgttatcatgggtgcgaacgtgggcaccaccgtcacggcgtggctgttgagccttgcgggcatcagcggcagcaatatttgggtgaatcttttaaagccgtcatccttcacgcctgttttggcgctcatcggcatcattttctatatgttctgcaagtccggtaaaaagaaagataccggcatgatcctgcttggctttgcgaccttgatgtttggcatggaaaccatgagtggcgcggtttcgggccttaaagatgtcccggcgttcgcttcgctgttcctgatgttcaaaaatccgattcttggcgtgcttgcgggcgcgcttttgacaggtatcatccagtccagttcagcttccgtgggcattttgcaggcattggccgtaacggggcaggtcagctacgcggcggctatcccgattatcatgggccagaatatcggtacctgcgttacggcgctgatctcctccgtgggcacacagaagaacgcaaagcgcgcggcagtcgtccatttgatgttcaatgttatcggcgtggtcgtgttactgacggccttctggattgtaaagatcgtgtttgcaccggctattctggatgaaaacgccaccatgtccggcatcgcgattgcgcactcgctctttaatatcctgtgcacggcgatgctgctgccggcaggcggcctgcttgaaaagctcgcaatccgcatcgtgccggataagggcggcaaagagcagcctgttgagcttgaagaacgtctgctcatcacaccgtccgtcgcgctcggccgctgccgtgccgttgcgggcgaaatggcacgctgcgcaggcgaagcgctgcatatggcgctgacgacctttgaaaactattcgccggagcttgcggaatccatccgtgaaaacgagagccgctgcgaccgctacgaagacgagcttggtacatacctggtgcgcctgagcgcccagcagctgagcgatgccgaaagcgaagaagccaccgaattattaaaaattatcggcgattttgagcgtatctccgaccacgccgtgaacctgcttgcggcgtcggaagaactgcgcagcaagggacttggcttcagcgccgccgcagaaaaagagctgaaggtgctcatcggcgcggtgagtgagatattgaatacggcagagcgcgcgttcagcgaaaaagaccttgcagccgccgcacaggtagagccgctgaaacaggtcatcgttgcactgaaggagcagatgcgcacgcgccatattctgcgcatgcagcagggtcattgcagtattgaagcgggcttcgtgtggtccgacctgctgacggatctcgagcgaacggctgaccactgctccaacatcgccggctgtgttctggatgcggcaaaccacggtcttaatctgcacgaaacgctgcgcgccatgcgtgccgacgaccccgacttccgccgcgcctacggcacctacgcggaaaaataccgcttgcaggcagtataactacataatcaatcaagtaaaaaagagacagtttgctttgatatgtaccccaataccggacacccggtatgggggcatatcactttaagctgtctctttttgcatttgacgaagttgctgagaatgctgatttagaggttgtaacggaatagagcattttaagactgggactggcgtacggaattgtatttggaattacccaatgctttgaggtaggcatcgtaagccgcttccaacgtagaaaactctttcccgtttttcagaatttccttatactgattttgcgtaataagcgattttgaaacggtaacatagtccttaccgtttcgcttaccggtcgtggtttcggaaacataatagttcccgttgccggtttgaataattacggggatttcctttccgggcccgaccttatccgtgtccagagatgtccagaaaagataccgatatgcttctcgtctatctcttccgtcgccaagataggcccatgtgcaattaggctgctgcaaaagacttttattcagcttattaatctctgtggtaatggctggaacatatttcgaatccggacatctggagtcaaactcaaagtttgtattgtttttcatgtcttgccaaaattccgtttcgtatagaagtgggaagaaatccgtctcgtttgtgttaaacgggtatttaggttcagatggatcggcttttccgctccaagtgagaatgattccgtaatcttccttatacgatacgacacaggttccgtttggcgcagcaacgcctatccagttcttcgtgtctccttggcttttggaatgaacaataccgccgatattcacaggatctactgattgccagtcggcctgcttctgttttaggttgacggttacggtagcctcagaatctccgagcaacgcctctgtagacacctgtgcataagcggagcggacatttgcaagatctgtcgcttctctggctttttcaagctgtgacgcaaataccggaatggcaactgcaatcaatacagcgatgattgcaatgacaattagcatttccatcaatgtgaatccgtttttgttttgcttcattaaaatccctgctttatctttgaatagaacaaatacatggtgaaaataaacatcggagttcatcaccgaaggtctctgcaatattttttaccggaaaggatttctgcgaaaaaaagatgattaaatcgtatggtaaagacccatggaaaccaaaacttctgtaataaaggaactggacaccaatcaagatacgcgtcgtatcgaaattggtgtccagttatggtccgagtgacaggagttgaacctgcggcctcttgaaccccattcaagcgcgctaccaaaactgcgctacacccggataacgaatttattatacacgatgcccgggaaaaaagcaagcagttttttcacaattttatgcggaagcggaaaatagaggaaagcggctttaaatcagactcagaaaatagcgaaacagcttttcgccgttcactgcatcggggcggcggtgcgcaaagccgatgcgctccgggtgaaactgcacgccgatcactttgccgttttcatggataaagccctcgttgatgccgtcgtcgctgacgcacagagggataagtcccgcgccgagcttacctgcggcctgatggtgtgcactgttcacggggaattcttcgccgtaaaattcgcgcatcagatcatgctgcgcgcgtaccgtgtgaatggcgtcgccggtctcttttgccgccatgtggtgctgcgggtccggcacattctgaatgaggtcgccgccgaatgccacgttcagcacctggtgccctctgcaaatgccgaataccggcttgcccgctgcaaaaaagcattttgcaagcgcaatctcgtctgcatcacggctgtcatcgatgccttcgctcgccgtgttttcctgcccatagagcacaggatttacatcggcgccgccggggatcagcaggccgtcgcaagtgtctgcgtcggaaagtgtcatcgagattaccggctccgcgccgcaagccgtcagcgccgccacataatttgcaaaatcgccggggttgccgcgcataaagatccttttcatcaaggtcactccttcaaaatgaaaaaaagatgaaaaaacaatttagaaactatggattagtataccagttatgtggtatacttgcaatagaagatacgaaagaaaagggagcatgaacgtggcaaagcacatggcggggccgcaaggtggacattacagattaaaacagccgcaaaaacgggagaagcataacaggattcccgcacgtgtactgaaatcgcgtgcacggcttttgcttagtggggcagggtgcattgcggctgtgcttatcatcacagcgttgcttgccatgccgcatcaaaatgcagagcccatagaagctgctgcctcgccggaagcggtaccgagcaccgctgcggagagcatttcagccaaagcaagtgtgctttctaaaacgacctccactcccgaatctgcctttcagcagctcggcgattggcgcctcgtgctcgtgaacagcgaagtgccgctgccggacgatttccaaatgaccccgacgctgttcgataccatcaccgtcaactccaaaatgtacccggggctcacggcgcttatcaatgcagcgtataacgacgagatcaatttgtgggttgcctcgggatatcgcagcgtggaggagcaggaaagcgtgctggatcgcgccgtgcagcgccgcatggcagacggcatgacctatgaaaacgcgtatgaagacgcgcggatcaccattcaggcgccggggtacagcgagcatcacaccggccttgcggttgatttcaacgacgttgaagacgatttccgcgagacgaaagcctacacatggctgcaggagcacgccgcagaatacggctttgtcgagcgctaccccaaaggtaaggagagcatcaccggcatcgattacgagccgtggcattaccgctacgtcggcaaggagcacgcgcagcgcatgaacgagcttaacatgtgtcttgaagagtacgtggcgttcctcaagggcgattaagaacagaaaacgggaaaaagatggcgctttttcccgtttttttattgcaaaattctgcgcacagatatataatagaacattatatgatggtgtagtattctttcatgccggcggcatggagagcaacgcaccgaaaaaccaaggaggttgttttaatggttcgcacacgctttgcgccgagccccaccggtttcatgcacgtcggaaacctcagaacggcgctgtacgagtatctggtggcgaagtcccaaaacggcacgtttgtgctcagaattgaagacacagatcaggagcgctatgtagaaggcgcaacagacgttatatataatacactgcagcaagtcggtctgcagcatgacgaaggaccggacatcggcggcgaatacggcccgtatgtacagagcgaacgcaaggatatttataaaccctacgcagagcagcttgtgcgcgagggcaaggcatactattgcttctgcaccaaagagcgcctcgagtccattcatcaggacggcgagttcggcggctacgaccgtcattgccgcgacctgcccgcagaggaaattcggaagaacctcgacgccggtatgccgtatgtcattcgtcagcgtgtgccgctcgagggctccacgtcctttgaagacgccgtttacggcaccatcacgatcgaaaacaaagagatcgaagatcaggtgcttttaaagtccgacggctacccgacctacaactttgcaaacgtcatcgacgaccacctcatgcacattacgcacgtcgtgcgcggctgcgagtacctcacctctacaccgaagtacaacatgctctacgacgcgttcggctgggaaaagccgatttatgtgcacctgccgctcatcatgggcaaaaatgaagacggctccgtctcaaagctttcgaagcgccacggttccacaagctttcagggcctcctcgaagacggctacctcgcaccggtcatcacgaactacatcgcgctgctcggctggtgcccgaaggacaaccgggaaattttctcgctgaaagagctcgaagaagcattctccatcgacggcatcagcaaatcgcccgccgtgttcgattacgataagcttctgtggttcaacggcgaatacatccgcaagatgagcggggaagagttccgcaccgcggcgatgccgtactacaaagagattttcggcgacgcagaaaagccgtacgacgtgctcgacgccattttgcagccgcgtattttgaagtttaaggaaatcccgagcctgctcggcttcttcaaagagctgccggaatattccgcagacctcttcataaacaaaaagagcaaggcaacgctcgagaacgcgcccgtcatgctgcgtgccgccatcgagacgctgtccgccatcgaaaactggcaggttgataccatccacgatgcactcattgccctcgcacagagcctcgaagtgaaaaacggcactctgctgtggccggtacgcatcgcggcggcaggccagaccgttacccccggcggcgctatggaaattctcgccgtgctcggcaaagaggaggcgctgcgccgtttgcagctcggccttcaaaagatcgagaacgcataaagcaagaggaaaaacctgatattaggaaaggtatggacaaattatgagtgaagagatcaaaaacgaagcggtctccgaggagatcagcagcagttttatcgatgattttattatagaagacctcgcagagggcggccgctgcgaaggcatgaaggtgcacacccgtttcccgccggagccgaacggctacctgcacatcggccacgccaaggcgatctacgtcgatttcggcaccgcagagcgctttaacggtatctgtaacctgcgcatggacgacacgaaccccacaaaggaagacgtggagtacgtcgatgccatcaaggaagatatccactggctcggctacgattgggaagaccgcttttactatgcttccgattattttgaagatatgtacaacggcgccgtagagctcatcaaaaagggtcttgcctatgtttgcgagctcacgcctgaccagatgcgtgaaatgcgcggcgacctcaccaccccggcgcagagcccgtaccgtgaccgtccgatggaggagagtctcgacctgtttgcccgcatgcgcgccggcgagtttgaagacggcagaatgacgctccgtgcaaagattgacctcgcttccggcaacttcaatatgcgcgacccggtcatctaccgcatcaaccacatgccgcaccatcgcaccggtaccaaatggtgcatctacccgatgtacgacttcgcgcaccccatcgaagacgccatggagcacatcacgcactcgctgtgttcgttggaatttgaggatcaccgtccgctgtacgattgggttatcaacaacgtcacgctgcccgcaaagccgcgtcagatcgagttcgcccgcctcggcatcaacaacacggtcatgagcaaacgcaagctgcgcgcactcgtcgaaggcggttatgtcagcggctgggacgacccgagaatgcccaccatctgcggcctgcgccgccgcggctacaccccggcctccattcgcaatttcagcgtgcgcaacggtgtttccaaggtgaactctaccgtggaatacagctttctcgagcactgcctgcgcgaagacctgaacctcacggcaaagcgcgtcatgggcgttctgaaccccgtaaagctcattttgacgaactatcccgaagataggaccgagacgttcgaggtcgagaataatccgaaccgtcccgaagacggtacccgcacggtcacgttcggccgcgagctgtacattgaagccgaagacttcatggagacccctgtaaagggctatttccgccttttcccgggaaatgaagtgcgcctcaaaaccacttatgttgtcaaatgtaccggctgcaaaaaggacgaaaacggcaacgtcgtcgaggtctatgcggagtatgaccccgagtcccgcggcggcaacccggcagacggccgcaagatcaagagcaccatccactgggtggacgcgaagaacgccgaagacgccgaaattcgcctctatgataacctctttactgtggaagacccggatgcaggcgatttcttagagcttttaaacccggattccctcaaggtcctcacgggctgcaaggtggaagcgggcctcaaaaccgcaaagccgggcgagagcttccagttcatgcgtcagggctatttctgcgtggataacaaggattccgcagaagaccaccttgtcttcaaccgctccgtttcgctgaaggacggcttcaaaaaaaagaagtaatggaatagttgtccgcacagtgcaaaaccatgcgctgtgcgggcttttgttgttccattcaatcggtgttttgtcattcgtcaccttaattttaattttaggttgacgaaacgctttgtgtgtggtaaactggtagacgaaattttcgctgccggttttgccggaaaggaaatttatgcgcatacaagatgcagttttagacgcgcttgaaaaaaatcgcggagaatacctctccggcgagcagcttgcgtcgtcgctcggcgtttcccgcaatgccgtgtggaaagccatccaaaagcttgaagaagccggccataaaattcgcgccgtgccaaaacgcggctacacgctggcgccggaaagcgatgtgctcaccgtgcagagtgtctcacggttcctcgataccgatatgccggtttacttgcaggtgcagaccgaagtcacttccaccaatacgcttttaaaggcacaggcggagcagggcgcgccggagggcaccgtgctcattgcggaatcgcagacggcaggcaagggcaggctcggtcggcacttcacgtcgccgccgggtacaggtatttatttcagcctgctgctccgcccgcactgcaccgctgaaaaatcgcttttcatcacgactaccgcagcggtcgccgtgtgcgaagccattgagcaggtcacggggctgaacccgcaaatcaaatgggtgaacgacgtttacctcaacgagaaaaaggtctgcggcattttaacggaagcttccgttgattttgaaaacggcggtctcaactgggccgtgctcggcatcggcatcaacatcgctgtgccggaagagggcttcccggaggagattcgctccatcgccggtgctattttcgacggcccgtgccccgtggagatgcgcagccgcatttcggctgccgtcatcagccgctttttcgcgctgtataagaacctcggctcgaacgcgttcatcgaatcgtaccgcagccattcgtttctcaccggccgcgccatcacgttctcgctcggggaggagacgtaccgcggtgtcgtcaccggtatcagcgacgaagcgcacctgctcgtccgtctcgatagcggcgaggagcgcgcgttttccgcaggcgaggtgcagatccacaagggctttgcaaacccaaaagccgaataaactgcttagtgtgccgtattccgaaatgaataggggtaaataacatgaacagcaacagagagaaaatcaccaatatcgtcatggtcggcgtattcgccgccgtgctcgccgttttgtcacagatttcgttcccgctgccgagcggcatcccggtcaccttacagaccttcgcggtcgccctgtgcggctatgcactcggctgtaagcgcggcacgctcgccgtgctcgtctatatcgtgctcggcgctgtcggtctgccggtgtttgcaaacttctccggcggcttcggttcgcttgtcggtctcgcgggcggctacatctacggctttctgcccatggctgcgctgtgcggtctcggcacaaaaatgccgcaccgtgtgctcgccattgtactcggtgttgcgggtcttgcggcttgccatctgtgcggcacgattcagttcggcattatctccggcaacggcccgtgggcggcgttccttgtggcctccgtgccgtatctcgtcaaggacatcgtctccgttgcggcggcttacggcgtagcgactgctctcagtttcgcgctgaagaagagcggcattcacatcgcagcgtaaaagcgtttcacaaagcgtttggaataaaatagaaaccgaaaaggccgtctgcaagggaaagtcccgcgcaggcggtcttttgctttgacatcaatacagcattgtgctatactgaattttcaagggagcattcgcgcccaatacacgataaaggaggctgtaccatggatgttcgggtaggcgacaaattacaaatgaaaaagccgcacccctgcgggacaaacgtgtttgaagtgctgcgcatcggcgcggattttaaaatccgctgcaccggctgcggcagagaagtcatggtgccccgccacaagtgtgaaaagaacattcgcaagatcgtgcgcgaaagtgccggcagcgagcagtagcgcctctcagaccgtttcattttactatctgtctgaaaggaagctttgctatgtttgaaaatctctcggtttttgaaaaccgatatgaagagcttaatatgaagctctatgatcccgccgttgcggcagaccgcaatctctaccgcgacctcatgaaggagcacaaagaaatcgaacccatcgtggagaaataccgcgccttaaaaaaggccgaagcatcgctcgaggatgccgaagcgattttaaacgactccgaagccgataaagagctgcgccaaatggcgagcgacgagatgagcgccgccaaaagcgatatcgaaagcatctcggaagaactcaaaattttattattgcctcgcgaccccaacgacgaccgcagtgttatcgtggaaatccgcggcggcgcaggcggcgaggaagcggcactgttcgcctataacctttaccgcatgtacaacatgtacgccgaaaagcgcggctggaaaacggagatcgtcagcctgaatgaaacggagcttggcggctttaaggaagtcagcttcacaatcgacggtgacggcgcgtattccagattaaaatttgaaagcggcgtgcaccgcgtgcagcgcgtgccggaaacggaaacgcagggccgcatccacacaagcaccgctacggtcgccgttttgccggaagccgatgaggtcgagctcgagatcgacccgaaagatttaaagattgatacattccgctccagcggcgcgggcgggcagcacatcaacaaaacgtcgtctgccatccgtgttacgcacctgcccaccggcacggtcgtcgagtgtcaggacgagcgcagccagtacaaaaacaaagataaagccctgcgcgtcctgcgtgcccgactgttagacgctaaggtggcggcgcaaaacgccgagattgccgcaaaccgcaaaagtcaggtcggcaccggcgaccgttcggagcgcatccgtacctacaactacccgcagctgcgcgtgaccgatcaccgcataggcctgacaatctaccgcctgttcgacgtcttaaacggtgacctcgatgaaatcattgacgcactcatcgccgcagaccgcgccgaaaaattaaaagagagcatggagaacggatgaacatggatacgcgattattggatgaaaaaaacgaacaggatataaaagaagcggggaagattctgcgccgcggcggtcttgtcgccatccccacagagaccgtctacggcctcgccggcaatgcgctggaccctaccgtctccgcacagatctacaaagtgaagggtcgcccgtcggataatccgctcatcgtgcatatcgcggatatcaaagaattgcctgcgcttgtcgaagagattcccgaagccgccaaaaagcttgcagatgccttttggccgggcccgcttaccatcatcatgaaaaaatcgccgcttgtgccgatgcagacgaccggcggtctcgatacggttgccgtccgcatgccgtccgatcccaccgcgcgggcgatcattaacgccgcaggcgtgccgcttgccgcgccgtccgcgaatctctccggtctgcccagccccacatcgttcccgcatgtgtgcgatgatctcatgggccgcgtagacggcatcgtgaacggcggcgactgcgaggtcggcgtggagtccaccgttatcaccgtcgtcaccgagataccgcgtgtgctgcgcccgggcggcatttccgtggagcagctgcgccgcgtgctcggcagggtagacgtggaccgcgccgtgctggaaaagcccgcggaaaacgccaaggtcgcctcgcccggcatgaaatacaagcactacgcgccgaaagcggatgtctacatggtggacgcttccgccgaagactacgccgcgtttttgcatacgcactccgaagcagctgcactttgctttaacgaagacgtgccgtacctcaaaaaccggtgcgtgccctacggcagcgccgcagattccctttcgcaggcgcacgggcttttcacgtcgctccatcacctcgatgagatcggcgcaaagaccgtttacgcccgtatgccgcgcaaaagcggcgtaggccttgcggtttataaccgtctcattcgcgcttgtgcgttccgcatcgtaacgccgaacgagcagctcgtcatcggccttacgggccagaccggcgcgggcaaatcgacggtcgcaaagcagcttaaggcgcgcggctgcgtcatcatcgactgcgacgccgttacgcacgatccgtctctttatgcaggaacatgtcttacggagttgcaaaatgcgttcggccgtgctattataaaagaagacggcacgttagaccgccgccgtctcgcaaacctcgcgtttgcaagcgaagagggcaagacgaagctgaacgccatcacgcatcccgtgatcttagcgcgtctcaaaaaggagattgccgcatataaagatgcaaaggtcatcgtgctcgacgctccgacgctgtttgaagccggtgcggatcgcctttgccgccgcgtggtctccgttcttgcggatgaaaccgtgcgccttgggcgcatctgccgccgcgacggtctcacggagcaggaggccctgacgcgcatgcacgcccaacagagcgacgatttttacatcgatcgctccgattacacactcgataacaccgtcgctgtttcggcggacaatatggataatatgctcgcagcgctcggctgcgcacaccccggtgaatccgattgaataagagaagcaaacatttaaaaaagtccaaaaagaagcccttgtggccatggattcttatcgccggcattgcagctgccgtgctcgttgttttcgcggtgcaaaggctgcatcccgatgtagaccacatgctttacccgcgcaagtacgaatccatcgtcaaaaaagaagcgaaggagtacgacttgccgcaaagccttgtctatgccgtcatcaaggcggaaagcgatttcgaccccgaggcagagtccccggtcggcgcgctcgggcttatgcagatgatgcccgagacgtttgactggatgcaaacgcatatcggcggggaatatgacgcaagcgctttgctcgaccccgaaatcagcatcagatacggctgtgcgctgctgcgcgtgcttttaaacgagtacgacaacctcgccacagcggtctgcgcctacaatgcaggcatgggaaacgttacgtcgtggctttcggaccccgcatattccgaagacggagtgaccttaaaagaaattccgtttgaagaaacgcgtctttacgtccagaaagtccttcagtataaagaaacttacgaaaaattgtatgggggaattgaaaatggctaaaaaagcagcggaaaaatccgcaaaagagctgtccgaaatgctcctcaacccgcgcaagaacggctttttcaaggtcacagatgagaagatcgaaaaagcagataagttctgcgaaggctacaaggcatttttaaacagcgccaaaaccgagcgcgaatccgttgagtacgcggtcgcggctgcagaaaagcacggctttgtgccgttcgacccgaagcacaagtatgcggcgggcgacaaagtgtattacaacaatcgcggtaaagcaatttgccttgctatcatgggtaaagagggctgcaaaaacggcgttcgcattgccgcagcacacatcgataacccgcgtctcgacttaaagcccatcccgctttatgaatcctccgagatggcgtacctcaaaacgcactactacggcggcatcaaaaagtaccagtggacggcgattccgctcgccatgcacggcgttgtcgtgaagagcgacggcacggtcatcaaggtctgcatcggtgaagaagcgggcgatccgcagttcaccatcacagatattttgccgcacctcggtcaggatcaggctacaaagccgctgggtactgcctttacaggcgaagaccttaacatcctcatcggcagccgcccggttcgcgacgaggaggctaaggatgcatataagctgaacatcatgcgtctcttaaacgagaagtacggcatcgtagaagccgacctcatctccgcagagatcgagttcgtcccggcgttcaaggcggtggatatcggctttgaccgcagcctcgtcggcgcttacggccacgatgaccgcgtctgcgcatacccggcacttgaagctatcctcaactgcaagaacccggtgcagaccgtcgtcactgtgctcaccgataaggaagagaccggcagcgacggcaacacgggcctcaactccgagtacatgcgttacttcatcgctgacctcgcgcaggcagagggtgaagagccgcgccacgtgctctccaagtccacctgcatttccgccgacgtcaccgcggcatatgatccgcattatgcttccgcttacgaggcacagaactccacctacatcaacggaggtctgggcatagccaagtacaccggcgcacacggcaagggcggtacgtccgacgcgaacgcagagttcgtcgccaaaatccgccgcacgtttgacgatgcaggcgtgctttggcagatcggcgagctcggcaaggtcgatcagggcggcggcggcacggtcgcaaagttcatcgcgaatctcaatgtcgacgtgctcgacatcggtgtgccggtgctttccatgcacgcaccgtttgaggttgtctccaagctcgacgtctacatggcctacaagggcttcaagtcgttcttcgacgagaagtaatctgtaaagcaaaatagcattacataaaatttcaaaaagctgtacgtaaagttctattgctttacgtacagcttttcttcatatcttcaagcaaaaagcccgccgcaaagcgcagcaggcctaattctttgtggtaagatattttgctttacagcggcagctgatccaattcgtcctctgtaaacaccgggatgccgttcgcgttcagaagctccacggttacaccgttgccgggaatcttgttgcccgtaaacgtgccatcgtaaatgagtcccttgccgcaggacggacttttcgccttcatcacggcaaaatccacgtggttcagcttcgcaaagtacagcgccgtctctgcgccttttgtgtacgccttcgtcacgtccttgcctgcacaggagatcaccttgtcaccctgccgctccgccgggtcgcggggcgtgggcagaccgcccatctgctcgggacatacgccgatgatcgtgttgctttctgcaagcttaatgagcgcatcgcacttgcagccgtcgcccttatagcggcattcgcagcctaaaaggcaactgcttgccaaaattacagccatgtttataccttcttttaattcgatttttacactaaaagcgggtcattgtccgtagatttccggttcgttctcgtcctgctcgtagatttccacgttcgtcttgccatccacagcttccaaatgcacggcgatgatctcgcgtagagaggtggggatattcttgcccacaaaatcagggcgaatgggcagctcgcggtgaccgcggtcgaccaaaacgaccagccgaatgcgcgccggccgcccgaaacggaacaccgcgtcgatcgccgcgcgcaccgtgcggcccgtaaacagcacatcgtccaccaaaatgacttccttgtcgttgaggtcgaccggaagcgtctgcgtgttcacagtcggcaggtcgtgccgctttgtcaggtcgtcacggtagaatgtaatatccagtgtgcaggtttgcacctttacaccggtgtgcgtctcaatgttcgccgcaatctgctccgcaagcggcacaccgcgcgttttgatgccgatgagcaccacgttttcgaggtcgcggcttttttcaatgatttcataagaaagccgcgtcaaagcgcgctttacggtaacgtcgtccatcagctgggctttcagcttcataggcatgcttgtcaatccttttttaaactctttgatttattgtagcatttcggcgcttttccgtcaagacgcgtctctttcggttgatttttgtcaaagcgtgtgctatgatatgctttgaaaataaacgaaacaaggcggtgcgccgtcttacggactaaggaaggtcaaacatggaagcatatctttccaatcttacggttttcaaccacccgctcatcaagcacaaggtcagccacttgtgcgacgttaacaccggcaccaaggaattcagcgaactcgtcaaagagcttgccatgcttatgggctacgaaacgctcaaggagctcaaaacgaaggacgtggagatccaggcgccgctgcagaagatcattaccccggtgcttgcagaggatttcaccatcgttccgattctgcgcgccggcctcggcatggtagacggcctgcgtgagctttcgcccacggcaaaggtcggccacatcggcctttaccgcgacgaggaaaccctaaagccgatgacgtattacttcaagctcccggtcgataccgcagacggccccgtcgtcgttgttgatccggcgcttgcaacaggcggcagcgcagatgctgctatccagtttttaaaggacgcaggctgcaagaacatcaagttcatgtgcattttcgcgtccgaggtaggcatcaagctgctgtatgaaaagcacccggatgtcaaaatctacgcggcaaactacgcacccggcccgctgaacgagaacggctacattcccaccgcagccggcgacgcaggcgatcgcctgtgcggcacagtcagctataaaccgaataaaaaccggtaatccttgtaaacgtaaaagctcttcgcatggttcggagagctttttctgtattgtgctgcctttttttgatgaatattcacaaactattcacaagtgcgcgaattacgttgactttcgtcgaatgttgtgctatagtttagcgttggaaaacgaaatacgatctttaaccccgatactgtgatattggcaagattgactcttaatacgtctttacagacggcgtgctgacaaggctcaagctccgcccattttacaggcagagcttttctttatgctcggaaaagcataggggagaaaagaacgtgttttggggtaagaaatgaaaccacggttcggaagaaaggaaatgatttcatgaagttgatttacggcatcgaagataagccgaagttcagcaaaacactggtcttcgcattccagcagatgatcgccatcatggcggctacgctgctcgtaccgctgcttgtcaccagctacggcctgcaggcagacgccgcagccgcactgttcggcgcgggcatcggcaccatcgtatacctgttctgcaccaagcgcagaagcccggtattcctcggctcctcgttcaccttcctcggcgcgtatgcggctacaatcggtcagaattacggctactggggcatgctcatcggcgttgcgttcgcaggtcttgtttacgtcatcatcggtcttgtcatcaaggtcgtcggctccggttgggtcaataagctgatgccgtccgtcatcatcggaccgatcgtcgcgctcatcggtctgtccctctccggcacggcaacaagctggatcatgggcaacggcgctgcagctgtcgtatacggcgagacctacaactgggctgccatcatctgcggcatcttcaccttcttcatgattgtcatagcgtccgttaagggctccaaaaccgtcaagctcattccgtttatcgtcggcatcggcgcgggctatgcgcttgcactcgtctttacaatcatcggcatggcaacgggcacagagagcctcaagctcctttccttccagcctttcatcgatgcattcggcacattcagcatcaccagcatcgtcgattatccgaagttcttcttcctcaaagcaatcgagacgaacggccagtatccgcttgatgcggctgccatcggcaacatcgccatgatctacattccgatcggcgtcgtcgagctcgcacagcacatcgctgaccacaagaacctcagcacggttgtcaaccgcgacctcatcgcagacccgggcctcgataagaccctcatcggcgacggcctcggctccattgtgggcgcgttcttcggcggctgtgcaaacaccacctacggcgagtccatcggctgcattgccatcaccggcaacgcttccatcgtttccatcctcaccgcggcactcggctgcatggtgctttccttcttcactccgttcgtcgtgctcattaactccattccgaagtgcgtcatgggcggcgcgtgcatcgcgctctacggcttcatcgccgtttccggtctccagatgctccaccgtgttgatctcggcaacagtaagaacctgttcgtcgtcagctccatcctcgtctgcggcatcggcggtttgtacttcggcttcggcacgaacagcatcaccggcggcgctctgctgaacatcacgtctttggctgttgccctcatcgtcggcattgtcacgaacctcatcgtcaataacggcaagctcagcagcggcgaggacggtcttagcagtgcagcttccgaaatgggaaaggtagacccggaaaccaccgagatcccctcccgtaaaagcaaaaagaagtaattcttcaaaaaatagcgttaactgaaatgcacagcgcccgggcttcacagctcgggcgtttttctgttgtaaaggaattcgacttgcttttttcccgccatccgatataataataaaagataccgaaagaaaggggagagcaccgtgcggaaacgaaaaaaatacagtcccatccaaaagccgcgtccactgcatttggagcgcattatgaacctaaagcgttggacgggcattctgcttatctgcgccgccgctttcatggcgcttgcactgttcgtcatgtggggtttgccggtgcttttcccgcccgaagatccggaggattccctgccgcaggacaccgtactgcccaccgcgtcccccgctgcaagcacggaggaaaacgacctgcccgtgctcgaggacagcgtgaatctgttcgtcatcaacgaagaccaccctgtggacgcggatttcgcccccgaggagaccgccgagtttgacagcgtcacggtcgatgcccgcattgtgccggcactcaccgcactgtgcgatgccgcaaaagcagacggtgtcacgctcaagttttccggcggctatgtgtcctatgcagagcaggaagcgctttataacgccgaagtcgagcgccttatcgcggcaggttccaccaagattatggcgcgcgaagacgcaaaatccaccgtgtccgcgcccggcacaagcgacctgcaaagcggcctgtgcgtcaccgtgcaggacgaccccgcaacattttcgacaacggatacctacggctggctgcaaagaaacatggcgcattacggctttgtgttccgctatcccgccggaaaagaggacgaaaccggccttaaacgcaatgatcttgtcctgcgctatgtcggcacagagcacgccgccgccatccgcagactctccttttgcctcgaagaataccttcgctacatcggcgcctaacgaaaaaaacggatgctttcgggaagaaaaagaaaaaagttttctgtttttttgaaaaagaccttgcattttagaattttttgtgctaacataattagcgctatgtttatgtgttaacttcgctgttaaccgactaaccgcagatcaaccgaaagaggtgacagatatgaagaatatacatccggactatcaggaaacgaccattacctgcgcatgcggcaatgtgattcacacgcgttccacaaagaaggacatccgcgttgaaatttgctccaagtgccatccgttctttacgggtaagcagaagctggttgatacaagcggtcgtgttgatatgttcaacaagcgctacggtatcacgaagtaaatttatatggatcgttcagggcggtgctctttcgggcatcgcccattttttctccaaaggcaaatcgcgttcgtttcaaaacagaggggagcggtaaaaatggcagagtacaaaaccgtgcggaaaaacgcgcaggaccagtttgtggaaaagcgatcgcgtttcatcggctatgcctgcccggtgcagaccgagcaggaggcgctcgatttcatcacgtccaaaaaatccgagcactgggatgccagtcacaacgtctatgcgtatatcctgcgcgacggcaccatgcgcttttcggatgacggcgagccgcagggcacggccggtatgccggtgctggatgtcctgcgcaaaagcggcgttacggatgtcgtcacggttgccacgcgctatttcggcggcattctgctcgggggcggcggtctcgttcgtgcgtattcgcacaccgcgtccatcgccctgcaggcggcacagatcattaccatgcgcgagtgcctgctgttgtcgctcacctgcgattacggccggtacggccgcgttgcatcgcttgttccggaatgcggcggcgtgacggacgacacggtctttgaggaaaaagtcaccgttaaattccatttggcgcccgagctgctcggcacattccgcaaaaaacttgcggatgccacaaacgggcaggtcgatgtgacagaagacggaaaaaaattttttgaatttgaagaataaaagaagtaatttcgccgtttgcggcgtatataatactatgagggcaaaagtcagggcgttttgctccgagctttgcccgtaatcccaacggcatcgcgccggcggtcacgaaagggggcggtggaatgccgttgccggagtcctttatgcaggacttaaaatcgcgctgcgacattacagacatcgtttcctcgtatgtcaacctaaagcggcgcggcaaaaacatggtgggactgtgtcccttccacaacgaaaaatcaccgtccttcaacgtctacccggagaataactcgttttactgcttcggctgcggcgcgggcggcgatgtcatcacattcattcgcaagattgaaaatctcgattacatcgaggccgtgaaaatgctcgcggaccgcgtggggctgcaaatgccggagcagggcgtggacgattccatgagccgcctgcgtcagcgcgtgctggaaatcaaccgcgaatccgcccgctttttccacagcgcgcttttaagcccggagggtaagccggggcttgattatttcgcgcgcagacgcctgcccatgaaaatgatccgccatttcgggctcggctgggcgccggaaagccgctttgcgctcgtcaatcacctgcgctccaagggctattccgagcgcgagatgattgcggcgaacgtcgcggtggagacgcgctccggccgcgcgatggatcgtttccacgcacgcgtcatgtttcctatcattgatctgcgcggcaacgtggtcgcgttcggcgggcgcattttgacaaatgaaaagccgaagtacataaatacatcggataccccggtctaccacaagagcagcggtcttttcgcgatgaattttgcaaaaaacgcgctcgaaaacgaccgcatcattttggctgagggctatatggacgtcatctcgctgcacaaagcgggcattgaaaacgccattgcgtcgctcggcacggcactcaccgcagagcaggcgcgcatcattgcccgctatgcgaaagaggtcgtcatttgctacgattccgacgaagccggtcaaaaggccgcacagcgcgccattcccattctgcgcggcgcagggcttttggtgcgcgtcatggccgtgcccggcaacaaagacccggacgagttcatcaacgcatgcggggatgaaggcgcggcgcgtttccgtaggctcattgagcaaagcggcaacgatgtggaataccgccttgcaaagctgaaaagcgggtatgatttaagcaacgaaaacgggcgtattcaatacctgatggccgccgtagagctgctggcgggccttgaaaacgccattgagcgcgacgtgtacgtcagccgcctttcgcaggaattgaatgttgacaaaaacgccattttgcagcagatgtccgtttccgtgcgcaaaaaagcgcgtgcggcgcagcggcagcagcaaagggacatgacggagcagctttccgcgcggcgcgataccgtaaaccccgaaaagcgccgctatgtccgcgtggccaacgccgaagagcggctcatcgcgtgccttttccacaataatgacctcgcacagagcctgaaccgccgcgtgccgcccgaaaaattcgtgacggcgttcaatcgccggttatatcagagcctcctgggcaagattataaacgaagaaacggtcacatcaccgcagattacagacttttcggcggaatgtacgccggacgaaatgggccgccttgcgaagattgtgcaggaaaacgccggcatcaccgccaaagacgcggaagaatacgtgcagatcattttgagcgaaggcgcgttgaccgataccgataaggtgcgtggtgcgaaccccgccgacctgcaggcgcagctcgatgcactgcgcaaacagaaaaaataggaacattatgctttaaaacagaattgagataaaaaggcagtgtgcagacgctgccgagggaataagggaaaacacaggaaaggtatgataaactatggcagcacccgataagaaaaccgtgatccgcgatctgattgagctcggcaaaagcaaaggccagctcaccacaaaggagatcctcgacgccatcggcgaattggatttcgacccggagcacattgaaaaattctatgatacactggaatcgcacggcattgaaattatcgatgacttcagcgatatccagattgatgacatcgacctttccaaagtatccggcgcagatacggacgattttgatgccggcatgggcatggaaggcgtcgccatcgatgacccggtcaaagtttacctgaaagagatcggccgcgtgccgctgctttcctccgaagaagaagtgcgccttgccatcgccatcaaggacggcgacgaagccgcaaagaagcgcctttccgaagcgaacctgcgtcttgtcgtcagcatcgcgaagcgctatctcggccgtggcatgcagttccttgacctcattcaggagggcaatctcggcctcatcaaggctgttgaaaagttcgattatacaaagggattcaagttctccacctacgcaacgtggtggattcgtcaggccatcacgcgcgccatcgccgaccaggcccgcactatccgtatcccggtgcacatggtggagaccatcaataaggtgaagaaggtctccagccagctgctccacacgagcggccatgagccgaccgcggaggaaatctccgacgagctcgatatgccggttgataaagtgcgcgagatcatgcgcgtcgcacaggagcctgtctcccttgaaacgccgatcggcgaggaagaggacagccacctcggcgactttatcccggatgacgacgcaccggccccggcagatgccgcttcccatacgctgctgcgcgaaacgctcggcgatgtgctcgattccctcaccccgcgtgaggaaaaggtgctgcgcctgcgcttcggtcttgaggacggcagaagccgcacgctcgaggaagtgggcaaggaattcaatgtcacccgtgaacgtatccgccagattgaagccaaggcgctcagaaagctccgtcacccgagccgcagcaagaagctgaaggattttctggattgatcccgaaaggataggcacataccatgcacatgacactggaagcggactacgcagtccgcatcgtggaatttttggccgtgaaccccgggcgcgcagatgccaaaacgatctcggagcgcacaaacgtcacgctgcgctttacgctgaagatcctgcgcacgctcgtttcggacggcatcgtgcgctcgtataagggcgcaaagggcggctatgagcttgcaaagccgccgaaggagatcacgctgcgcagcgtgatcgaggcggtggaggggccgtatatgatttcccgctgccagggcgatgcgtacagctgccagcgcacctcgtgccgtttgcatcacatctacggtgaggtctcgcagcttgtgcgcaataagctggagtcctacacgttcgcgtccatctgcgcctgcgaggataccgaggcggacgaaaaaggcgaggggaaagaggcagaaacgtaagcgaatccgcgtaaaagtacacgcaagtacatacttaaaacgcaataattcgttttgaaagcggctttcgcttttaacttaatttcttcggcatccaaaattcaacataaacaaaacaaaaaccttcccggcttcgtttccgtttggaaaccgggaaggttttgcgtgtttttaagcggtatgaacgccgtgagactctgcacgggcaagagctacggctcagtttatgcggctgccgccccattccaccgctgtgaagccgtcgcgggcgggagcagtgagcgtttgcgcgggaatgtcgactttctcttcaagcggtttccacgccatgaagacccgaaggagcgtgtcgggcgcgggggagatatccagctgcgccacctgcgtatagcagtcggactgaaacgcgatgagattatagggattttcctgcatctggggaagccagtacacgatgaattcattcgcttctttgcgggtgagtccgaggtcgcgcaaggcattttcgaggaaagcggcggtgtcgctgcccgctacgcagaagccgtgggaaaggtcgtattccgcgctgtccgtgccttcccagtacaggtagttatacgtttggccgtcctcgtccgtcagagtgccgtcaggtttcgccgaaacatgccagccggttttgtaattcgggtaggtgcaagtgagcgttccgtcgtacgcgagcgtaaccgagacgtccgtttcttcttccggataaagataaatcaccggctttaacgtgagttgctcttcttcacattcacgttcgcgttcacggcatgccgaaagcccgcacacgaagccgattgcaagggccgcggcgaaaatctgctttgcgaaatgctttttcatacagtgttcctcttcaaattaaaatgattggcagcggataaaaataaagcccgattgcagtttacaaggtccatgtgcgatcgggtatacgggtcaaaattcaatttattctgctttggaatttgagaaaagaaaaagggaataaaactcgaaaaatttcgggaaaaggcttgacaaatccacagatacggtgtatcatattacaatgtatcatcatggatagatatgccatttctttctctgatctgcattataacacagttccgaaaaataatcaagcataatctataaaattcacatgaacggatattctttccgccgtttttaagtgattttgcttaaaaacacgggtcaaatactaagaatggagtggttgagtcaatggtgaatgttaagccggtacagcttggcaagaacacacgcatgagcttctcgcacatcaatgaagttctcgatatgccgaacctgatcgagattcagaaaaattcctacgactggttcctgaaggaaggtctgaaggaagtttttgacgacgtctccggcattacggatttcaacggaaatctggttctggacttcgtgaactacaagctcgacgaaaaacccaattacacggtaacggaatgcaaagagcgcgatgctacctatgcggcggccctgcgcgtcactgcacgccttctcaacaaggaaacgggcgagatcaaggaatctgaagtcttcatgggcgatttcccgctgatgacaccgtccggcacttttgtgattaacggcgcagaacgtgttatcgtttcccagcttgttcgttctccgggcgtctattataagatggagtacgataaaacaggcaaacagcttttctcttccaccgtcattccgaaccgcggcgcatggctggagtacgaaaacgatgtgaatgacgtactctacgtgcgtatcgataaaaacagaaagctcccgatgaccgcgtttatccgcgcactcggtctcggcaccgacgaagagatcaaggaatacttcggcgaagacgagcgcatccttgcgactatcgataaggataccacgcacaccatggaggaaggcctctttgaggtgtacagaaagctccgtccgagcgagccgcccacggttgaaagcgcgcagttccatttgaacggcctgttcttcgacccgagacgctacgacctctccagagtcggccgttataagtacaataagaagctgaaccttgccggcagaatcaccggtcgtcagctttcccgtccgatcgtcaacccggcgaccggcgaggtgatggcagaagcgggcactgttgtgtcccgcacgcttgccgaagacatcgacaacgccggtgtgaccaccgcttgggttgcccttgaggacgacaaggagacgaaggttatctcaaacggcatggtcgatatcgcaaaatacgtttcctttgatgcagaggcagagtgcggcatcaacgaacgtgtgcgctacgcagtgctctccgagattctcgaagcgtgcggcgacgacgaagagaagctcaaagagcagctcaccgcacgtcatgacgagttgatcccgaaccacatcatcattgatgatattttctcctccatcaactacatgacctgccttgctgtcggtctcggctttacggacgatatcgaccagctcggcaaccgccgtatccgttccgtcggcgagctgctgcagaaccagttccgcatcggcttctcccgcttggagcgcgtgatccgcgagcgcatgacgctgcagggtcaggatatggaatcccttacaccgcattctctcatcaatatccgtccggtcgttgcagcgatcaaggagttcttcggttcttctccgctgtcccagttcatggaccagacgaacccgctggcagagctgacgcataagcgccgtctctccgctttgggcccgggcggtctttcccgtgaccgtgcgagcttcgaggttcgagacgttcactacacacactacggccgcatgtgcccgatcgaatccccggaaggtcagaacatcggtctgatctcctatcttgcaacgttcgcaagaatcaaccactacggcttcattgaagcgccgtacagaaagattgataaggcgacgggcaaggttacgaacgaagtcgtttacatgacggcggacgtggaagacgagttcatcgttgcgcaggcaaacgaaaagctgaatgaagacaacacctttgcaaacgacagcgttctcgcacgtttcaagggcgagttcattcaggttgagccgacccgcgtcgattacatggatatttccccgcgtatggtcttctccgttgcaacggcgatgatcccgttcctcgaaaacgatgacgcgaaccgtgctctgatgggcgcgaacatgcagcgtcaggcagttccgctgctccgcaccgagtctccgatcgtcggtaccggcatggagtataaagcaggcgtcgactccggcgtctgcgtcctgtgcgaacgcgcaggtgtcgttaagagcgtcagtgcagacctcattcgcgtgacgaccgataacggcgatatcgacgactatgtcgtcacaaagttcatgcgttccaaccagagcacctgcatcaaccaggtcccgatcgtcaaccgcggcgaccgcgttgaagtgggcgatgttctggcggacggcccggccattaagaacggcgagatcgcgcttggcaagaacgcgctcatcggcttcatgacctgggaaggctacaactacgaggacgccgttctgctaaacgagaaaatcgtacgcgacgacgtttatacctccatccatatcgaagagtatgagatggaagccagagatacaaagctcggcgcggaagagattacccgcgacatcccgaacgtcaacgaagatctgctgcgcgaccttgatgaccgcggcatcattcgtgtgggtgcggaggttcacgccggcgatattctggttggtaaggtcacgccgaagggcgaaaccgagctgaccgccgaagagcgcctgctgcgcgccatcttcggtgaaaaggcccgcgaggttcgcgatacgtccctccgtgttccgcacggcgagtacggcaccattgtggacgttaaggtcttcacgagagacaactgcgatgagctgagccccggcgtcaacaaggtcgtgcgctgctatatcgcacagaagagaaagatctccgtcggcgataagatggccggccgccacggtaacaagggtgttgtttcccgcattttgccgatggaagagatgccgttcctgccggacggtacaccgcttgacatcgttctgaacccgttgggcgttccgtcccgtatgaatatcggacaggttctcgaggttcacctcggcatggcggcaaacgcactcggctggaagattatgaccccggtattcgacggcgcacacgaagcggatatccgcgagtgcttccgcatggcgggcatgagtgaggacggcaagttccgtctgcgtgacggtcgtaccggcgagtatttcgataacccggttaccgttggctacatgtactacctcaagctccatcatcttgttgacgataagattcacgcccgttccaccggtccgtatgccctcgttacccagcagcctttgggcggcaaggcgcagttcggcggccagcgcttcggcgaaatggaagtttgggcgttggaggcttacggcgcggcttacaccctgcaggagattctgacggtgaagtccgacgacgttgtgggccgtgtaaagacctacgaagccattgttaagggccagaacgtgccgaagccgggcattccggaatccttccgcgttcttatcaaggaactgcaggcactcggcctcgacatcaaggtactggataaggacaacgaggagattgacctgcgccagagcttcgacgatgacgatgatgtgggtctcaccccgggcgatcaggtctttgatgaagaaaacgtcgcaacggacggcgatttcgacggctattccatcgagaacgaagacggggaagaggacgacttcttctctaccggcgacgatgatgagtttgaaggctccgataacgatttgtttgacggcatcgacgacgagttctaatttcgggtgaaaggaaaggatcgcatatatggagtttaacgtttttgaatcaataaagatcggccttgcatcgcccgagcagattcgctcctggtcgtacggtgaggtcacgaagcccgagaccatcaactaccgtacattgaagccggagcgcgacggcctttactgcgagcgcattttcggaccgacaaaggactgggagtgccattgcggcaagtataagcgcatccgctttaagggtaaggtctgcgagcgctgcggcgttgaagtgacgcgcagcaaggttcgccgtgagcgcatgggtcacattgagcttgcagcgccggtttcgcacatctggtactttaagggcatcccgtcccgcatgggtctgattcttgacctttccccgcgcgtactggaaaaggttctgtatttcgcactttacatcgttacggatccgggttccgttcgtgagctctctaagatgcagacgctcaccgaaaaggaataccgcgacatgcgtgaaaaatatgaggacgacttcgaggcgtccatgggcgctgaagctgtgaagaagctgctcgaggatatcgactgcgaaaagctcagcgaagagctcaaaaaagacctcgaaaccgcgcagggacagaagcgcgtgcacattctcaagcgtcttgaggttgtggaatccttccgtatctccggcaaccgcccggagtggatgatcctcgatgccgtgccggttatcccgccggatatccgtccgctcgtacagttggacggcggccgctttgcaacgagtgacctgaacgacctgtacagacgagttatcaacagaaacaaccgtctgaagagactcatcgagctcggcgcgccggacatcatcgtgcgcaacgagaagcgtatgctgcaggaagccgtcgatgccctcatcgacaacggccgccgcggcagaccggtcaccggcccgaataaccgcccgctcaagtccctttccgatatgctgaagggcaagcagggccgcttccgtcagaacttgctcggtaagcgtgttgactattccggccgttccgttatcgttgttggcccggagctgaaaatgtaccagtgcggcctgccgaaggaaatggcactggagctctttaaaccgtttgttatgaagcgccttgtcgagaccggtgccgccggcaacatcaaggctgcaagaaaggccgtagagcgcgcgaagagcgaggtttgggacgcactggagattgtcatcaagaaccatccggtcatgctgaaccgtgcacctacgctgcaccgtctgggcattcaggcgtttgagccggtcctcgttgagggccgcgccattaagctgcatccgctcgtctgcaccgcgttcaacgcggacttcgacggcgaccagatggctgtgcatgtgccgctttccgcagaagcacaggcagaggcacgcttcctcatgctggctgcaaacaacctcttaaagccttccgacggcagccctgttgcggtcccgtcgcaggatatggttctcggttcttattaccttacgctcgataaggacggagagaccggtgaaggcaaggtattccgcaacatggacgaagcgttcatggcgtatgacgcaaaatatatcacgctgcactccaagatcaaggtcagaagaaccgtggagtacaacggccagacatatacgggtcttgtcgatacgacgatgggccgcatgatcttcaaccgcccgatcccgcaggatctcggctttgttgaccgcaccgacccggagaacatcctcaagtttgaggtcgatttcctcgtcggtaagaagcagctcggcaagatcatcgacaagtgcatcaaaaagcacggcacggcaatcacgagcgaaatgctcgatgccattaaggcacagggctacaagtattccaccatcggcgcaatcaccgttgctgtctgcgatgcgactattccgccgcagaagcaggagattcttgcaaaggcagaggcagagatcagcgagattaccgcagatttccgcgacggcttcctctccgacggcgagcgttacagcgcggttctgaagacttgggaaaaggcgacgaacgacgttacgaaagccctgcaggacggccttgaccgttacaacccgatcttcatgatggcagactccggcgcccgtggttctatgaaccagatccgtcagctggccggcatgcgcggtctgatcgcgaatacgtccggtaagacgatcgaaattccgatcaaggcgaactaccgtgaaggcctgaacattttggaatacttcatttcctcccgtggtgctcgtaagggccttgccgatacggctctgagaacggctgactccggttatctgaccagacgtctggttgacgtttctcaggatgttatcgttcgtcaggatgactgcggtacgaccgagggtctggaagtgttcgaaatcaaatccggtaacgagtccattgagccgcttaaggagcgtattgtgggccgctacctgcttgacgattactgtgacgagaatggcaacgtgctcgtctctaaggataagatgattggcgacgccgaagctgacctcatcatcagccgcggcacgacgcacatcaagatccgctctattttgaactgccgcacccgtcacggcgtgtgcaagaagtgctacggttcctcccttgcaaacggccagccgatcacggtcggcgaggcggttggtatcatcgccgcacagtccatcggcgagccgggtacccagctgacgatgcgtacgttccataccggcggtgttgcatccgcagaagatatcacgcagggtcttccgcgtgtcagtgagctgtttgaaagccgcaagccgaagcatctcgcaatcatcgcagagatcggcggtacgatcggctttgaagaggtcaagaagaaccgccacattgtcgttcgcggcgatggcgaccagcgcagctacctcatcccgttcggcgcacgcctcagcgtaaaagagggcgatgtggttgaaaagggcacccgcttgaccgaaggctccgtcaacccgcacgacgtgctcgccatcagcggcccggaggcggtgcaggattacctcattgaggaagtgcagcgcacctaccgtatgcagggtgttgatatcaacgataagcacatcgaagttatcgttcgtcagatgatgcgcaaggtgcgcattgaagacgcgggcgacacgccgctgctcgtcggcgcgctcgtcgataagaacgacacgcttcttgaaaacgagaagatcgccgcaagaattgcaaacggcgaaaccggcctgcgcgaggcgacattcacgccgacgctgctcggtatcacgaaggcatctctggcgaccgagtccttcctttccgctgcttccttccaggagaccacacgcgtgctgaccgacgccgccatcaagggcaaggtagacccgctgcttggcctgaaggagaacgtcatcatcggtaagctgattccggccggcaccggcatggactgctacaccaatgtcgaaattgcgccgacggcgccgagcagctctttaagccaggaggccgtagccgctttgaacagctttgaggaaaaaacttccgcacagaatgcagaagagggcttgacaaacgaataatgagcggtgtataatgtcaaatggtgtgttgtgggcatggaatctgagaatttctgccagaaccgcctttgaaaccgcataaaacagacctgtccgcgcgatttttgtacggacaggatactgttttgtataggcgcatgttctgcgggcaatataaacccgcatgacatatatagaaattgtgtaaggaggtgcaatatgcccacatttaaccagttgattcacacaggtcgcgcagtttccgagaagaaggcaaaggcgccggcactgctgaagggttggaactccaagaagagaattgctatcgatcaggattctccccagaagcgcggtgtctgcactgctgttaagactgctaccccgaagaagccgaactccgcacttcgtaagattgccagagtccgtctttccaacggtatcgaagtctccgcttacatcccgggtgttggtcacaacctgcaggagcatagcgttgttatgatccgtggcggtcgtgttaaggaccttcctggtgtacgttaccacatcatccgcggcacgcttgacgcgcagggtgttgcaaagcgtatgcaggctcgttccaagtacggcgctaagagaccgaaggccggcgctgcaaagaagtaatttctttaaagagccaaatttaatcgttacacaatgaacttttgaccggaaaagcgaaattcgctttaagggtatttataatagataagctactgattatcgtgcgtaaataccttttcttagccggcgggagcttgtgctttcgagtaccgatgaattcatactattatgtgaaggagggaagactatgccaagaagaggcaatgtagcaaaacgcgatgttttgccggatcctatgtataattccaaactggtcacacgcctgattaacaacatcatgtatgatggtaagaagggcgtagctcagaagatcgtttacgaagcattcgagatcgtcgaagagaagacgggcaagaacgctctggaggttttcgagcaggctatggagaacgtaatgccgagcctggaggttaaggcacgccgtgttggcggtgcaaactatcaggttccgatcgaggttcgtccggagagacgtcagaccctgggtctgcgctggatggcgagctattccagacttcgttctgaaaagacgatgaaggagagactggccggagagatccttgacgctctgaacggcgccggcggcgctgctaagaagcgtgacgatacgcataagatggcagaagccaacaaggctttcgcacattacagatggtaatttacctgtaaacgtattaaggaggattatatggcccgtcaggtaccacttgaatttacaagaaatatcggcatcatggcgcacatcgatgccggtaaaacaacaacgaccgagcgtatcctttattacacaggcgtcaactacaagatcggcgagacccacgacggttccgctacgatggactggatggcacaggagcaggagagaggtatcacgatcacttccgctgctacgacgtgcttctggccggacagaaacggtcaccagaaccgtatcaacatcatcgacaccccgggtcacgttgacttcaccgttgaagttgagcgttccctgcgtgttctcgatggttccgtaacggttttctgcgcaaagggcggcgttgagccgcagtctgagaccgtttggcgtcaggctgaggaatacaaggttccgcgtatggcgtatgtcaacaagatggacattatgggcgctgatttctaccgcgttgtcaacatgatgcgcgagagactgaagtgcaacgctgtaccgatccagctgccgatcggctctgaagataccttcaagggcctcatcgacctcgtggaaatgaaggcttatgtctactatgatgatcttggcaaggatatccgttgcgaagagattccggaagacatgaaagagctcgcagagaagtatcacaccgagatgatcgagcatgtcgccgagcaggacgacgcactcatggagaagtatctcatgggtgaagagctcacgatcgatgagatcaagacctgcatccgcaagtccaccatcaacaacacgatggttccggttacctgcggtacttcctataagaacaagggtgttcagaagcttctggacgcgattgttgattacatgccggctccgacggatgttccgtctattaagggtgtaaacccggaaaccgaagaagaggatgttcgtcactcttccgatacggagccgttctccgctcttgcatttaagattgctacggacccgttcgtcggtaagctgtgcttcttccgtgtgtactccggtacgcttacggctggttctaccgtttacaactccacaaaggataacaccgagcgtatcggccgtattgttcagatgcacgcaaaccacagacaggatctggaaatggtttacgcaggcgacatcgctgctgcagttggtctgaagaacaccaccaccggtgataccctttgcgacgaaaagcacccgatcatccttgagtccatggaattcccggagccggttatccgtgttgcgattgagccgaagaccaaggccggtcaggaaaagatgggcattgcacttgcaaagctcgcagaagaagacccgaccttcaaggcatataccgatgaagaaaccggccagaccatcatcgccggcatgggtgagctccatctggagatcatcgttgaccgtctgatgcgtgagtttaaggttgaggctaacgtcggtaagccgcaggttgcttacaaagagacaatccgcaagaatgcggattccgatatgaagtacgctcgtcagtccggcggtaagggccagtacggtcacgttaagatccgtattgagccgaacccgggtaagggctacgagttcgtcaacgcagttgtcggcggtacggttccgaaggaatatatcccggctgttgaccagggtatccagggcgcaatgctctccggtgtacttgcaggctacaacgttgttgacgtgaaggtcacgctgtatgatggttcctatcatgaagttgactcctctgaaatggcctttaagatcgccggctccatggcatttaaggatgctatgcgcaaggctgatccggtcatcatggagccgatcatgaaggttgttgttaccgttccggaggaatacctcggcaacgttatcggtgacctcaactcccgtcgcggcatcatgcagaatcaggaggctactccgggtgctatgcagatcaccagcgaagttccgctgtctgagatgttcggctacgcaacggatatgcgttccaagacccagggccgtggtcagtacaccatggagccctctcattacgctgaagttccgaagtctgtttctgaaacgatcatcgcttccagaaaaaaggctgaataaagcgaaatactacttgatttttttgcggtttgttgctacaatggtaataaactcaaaaggttattttactgaataaaaggaggcaattccaatggcaaaggctaagttcgaaagaaataagccccatgtaaacatcggtacaatcggtcacgttgaccatggtaagactactcttactgctgctatcacgaaggttctcgctctgaagggccaggcacagttcgaggattactccatgatcgataaggctccggaagagagagagcgtggtatcacgatcaacaccgctcacgttgagtatgaaacggacaagcgtcactacgctcacgttgactgcccgggccatgctgactatgttaagaacatgatcaccggtgctgcacagatggacggcgctatcctcgtcgtttccgctgctgacggcccgatgccgcagacccgtgagcacatcctcctctcccgtcaggttggtgttccgtacattgttgtattcatgaacaagtgcgaccaggttgacgacgaagagctcctcgagcttgttgagatggagatccgtgacctgctgaacgagtatgagttcccgggcgatgacaccccgatcatcaagggttccgcttacctcgcactcaccagcgagtccaaggacgtcaacgctcctgagtacaagtgcatcctcgacctgatggatgctgttgacgactacatcccgaccccggaacgtaaggctgaccagccgttcctgatgccggttgaggacgtcttcaccatcaccggccgtggcactgttgctaccggtagagttgagcgtggcattctgaagatgtccgacgaagtcgaaatcatcggtctcaccgacgagagaagaaagtccgttgttacgggcatcgaaatgttccgcaagctcctcgactttgctgaggctggcgacaacatcggcgttctgctccgtggtatccagagaaccgacatcgagcgcggccaggttctgtccaagccgggcacgattcacccgcacaccaagttcaagggtcaggtttacgttctgaccaaggacgaaggcggccgtcataccccgttcttcaacaactatcgtccgcagttctatttccgtaccaccgacgttacgggcgttatctctctgccggaaggcaccgagatgtgcatgcctggcgataacgttgtcatggacgttgagctgatcaccccgatcgctatcgaagagggtcttcgcttcgctatccgtgaaggcggcagaactgttggttccggcgttgttacgggtatcaacgagtaatttttgctcaaactaaaatctcatcattttcttcggggcgaggtgtgattcctcaccggcggtaaatgcctttggcataagcccgcgaccgcagttttgcgctgatccggtgtgattccggagccgacggtatagtccggatgatagaagaaacgtgaatcaaaaggatttcggcaccccgcgagttttcgtggggtgcttttttgattcttacccccgtttctgtattgacatagtataagttgggaatgcgcatggcttatgcggcattctaaaggcggcgctgcgcggatttgtgttttcccgtaaagggaaaatgcaagcgcgagtgaatttccttgcgctgcctgatattcatacagaaaggttctgacatttatgaccgtaaatactgcaaaaacttccaatgtgaatattcgtaaaattgcaatgaccggcgtactggcggcgattgcgaccgttttgatgtttttacacttccagctgccgtttatgccgagctttatttcgctcgacttttccgagctgccggcactgatcgcggcgtttacgcttggcccggtgagcggcgttgccgtttgctttgtgaaaaaccttgtgctgctttcgcagaccattaccggcggtgtgggtgagctctcgaacttcattatcggttctgcgtttgtggtgccggcggggttgatttaccgccaccaccgcaattacggcggcgcgattgtgggctctgttgttggcgcgcttttgatggcagtgctgggattcttctcgaatctgttcatcatttacccgatctacacgaatgtgatgccgatggaggccattatgggcatgtatcaggcaatcaatccgtccgtgcaggagttgtggcaggcgcttttgatctttaacttgccgtttacgttctgcaaggggctcatcagtgcggttatcacgattctggtatataaaaagctggagccggtcatcaacggcaaagtcgtatgatatgccggaatttggcggtataaaaccgggattttctgcggttttttcccttgctatttgcgaaaaactgtgttatacttttttacagtcaaaaatgaatatgcccttatcaagagtgacggagggaacaggccctttgatgtccggcaacctgcattttgcaaggtgctaattcctgcggcatggcaatgccgaaagatgaggattttgaaccgctcatctttgtgagcggttctttttttccgaaaattccttgtgggggctgtgagtgaaaagagtaaaggagcaaaacatgaacaacaaacatctttttacatctgaatccgtgaccgaaggccacccggacaaggtttgcgaccagatttccgatgcaattctcgacgatatcatggcgaaagacccgaccgcgcatgtagcttgcgaagtgacggcgacgaccggtatggtgcacgtgatgggcgagatttccaccgagtgctatgtggacatcgatgcgattgcgcgtaaagtcatcaaagagatcggttacgattctccggatgcgggcttcaatggtgcgacctgcgcggtgctgacctccattgacatgcagtccccggacattgcaatgggcgtgaacgaatcccttgagacgaaaaacggcgccgctgaccaggacgatctcatcggcgcgggcgaccagggtatgatgttcggctatgcctgcgatgagaccccggagctgatgccgctgaccatctctttggcgcataagcttgcaaagcagctggcaaaagtccgcaaggacggcacgcttgactacctccgcccggacggcaagacgcaggtgacggcggaatacgacggcgacacggtgaagcgcatcgacaccatcgttatttccacgcagcacagcgaggctgtctctctggagcagattcgcaaggatatgatcgaatatgttgtgaagccgatcgttccggcggagctcatcgatgagaacacaaagtattatgtaaacccgaccggccgttttgtcatcggcggcccggtaggtgacagcggtctgaccggcagaaagatcatcgtcgatacgtacggcggtgtaggtcgtcacggcggcggtgcattctccggcaaggacccgacgaaggttgaccgttccgctgcatacgcggcacgttatgttgcaaagaacattgtagctgcgggctttgcaaaaaagtgcgaggtgcagcttgcatacgccatcggcgttgcacacccggtttccgttatggtcgatacattcggcaccggcacggtggaggattccaagcttgccgaggctgtgcagaaggtctttgacctgcgcccgaacgcgatcatccgcaacctcgacttgcgccgcccgatttaccgtcagctcgccgcttacggccacatgggccgcgaggaactcggcgtgcagtgggagaagaccgacaaggttgaggctctgaaggctgccgtgctttaatttgcacaaaacagaataagaaccgaatgcaccttcgcgtcatagactggcgcggaggtgttttttatggagcctatcgggattgctttggtgtgcgcgtttacgctgtgtatctttttatttgctgtgcggagcgtttgcctgcgcgtgacacgttcaaaaatgctggaggatgcgctgccgtttacggtgtatgcgacgattcgccgcgcggacgacgcagagtatattgtgcgcagcgttttggaacgcgtgaagtggctggatttatacggcatgtgccgcattgtgtgcctgaatccgacaaacgacccggagatcgacgcgattatccgcagacttgtgcaaaaatacccgtttgcggagattggggcttttcaaacacgaaagaatgttctataatagaagcgtagaaatttaagtaatgaaggcagtaatgtttcagtgaaatattcggctttgccgaatgtgaaataatacttacgtattgtgaaatttttcgcttgcgcgaaaagggaaataaaacaaaccccaaaggatttgttttgatgataaatcaaggaggcgcaaccgatgccgcaggaaaacgggctgctggaaatggaaggcagcgtggaaaatatcgtctaccacaacgacagcaaccagtacacggtgttggaggtcgattgcggcgaagagctcatcacggtggtggggacgttcccgtatgtgagtgtgggagagcggctgcacctgtatggcacgtggacatcgcacgcgacgttcgggcagcagttccgcgcacaggcgtttgagcgctcccgtccggcggacacggcggcgatgctgaaatacctttcgagcggcgcggtgaagggcatcggcggcgcgctggcggggcgaattatagaagcgttcggcgatgaatccattaaggtgattgaggaagacccggcgcggcttgcaaccgtgaagggcatcacgctgaaaaaggcgaaagaaatctccgaggagatgcagcgcgtgaacggcatccgcgatttgatggcattcctcggcagctttggcgtgcgcccggaggacaccgtgaaggtgtggaaggtgtacgggcaggactctgtggcatgcattcaggaagacccgtaccggctgtgcagcgataagattggcatttcgtttgcggtggcggatcagctggcggagtcgttggagtatgaccgcgacaacaaggagcgcgtgaaggcgggcgtgctgtatgtgctgcggcacaatttgaataacgggcacacgtgcctgccggcggataaactgtgcgcggcggctgcgaagcttttgggcgtgccgccggagagtgcgcaggaggctttacttgagctgtgccagacgtttgaggcggtgaacgagaattttaacgggcgtgacttcgtgtttttgccgaagcagcaccgcagcgaggtgtactgcgccgaccgcatccatatgatgctgcgctacccgccggaatccattacgggcatcgaccgggagattgcggaaatcgagcgcacagaaggcatcgagtacgccgaattgcagaaggatgcgatccgcgcggcgctggaaaagggtcttttgattttgacgggtggcccgggcacaggcaaaacgacgacgctgaacgcgattatccgcattttgatggaaaaaggcgagacggtatttctggcggcgccgacggggcgcgcggcgaagcgcatgtccgagctgacgggcgtggaggcgaagaccattcaccgcatgttacaggtggactgggacgacaacgatgacccggtgttccagagaaacgagcgcaatccgctggagtgtgacgcagtggtcatcgatgagctttccatggtggacgcgtatgtgtttgaaagcgttctgcgcgcgctgcccatcggctgccgtttgatcttggtcggcgacagtgaccagctgccgagcgttgggccgggcaatgtcatcggagaccttattgcgtcgaaggtattcccaacagtgcaactgaaggagattttccgtcagtcgatggagagtctcattgtgatgaacgcgcacaagattgtagagggcgagatgccggagctttccgtgcgcagcaacgatttcttttttatgccgcgcgaggatgcacgctccgtttcggagacggtgcagtcgctcgtggtgacgcgcctgccgaaaagctacgggtattcgccggtgacggacattcaggtattatgcccgggacgcaagggcgagcttggcacggtggagctgaaccgtaagctgcgcgagcagattaacccgcccgcgaaaaacaagccgcaggtgacggtgaacggcacggttttccgcgagggcgacaaggtgatgcagatcaagaatgactacaacctgccgtggagccgcgaagacggcacggtgggcgaaggcgtatataacggcgacatgggcatcatcatcgatgtggataaagatgccggttgtctgcgtgtggaaatcgacgacaaagaggtgctgtatgattttgagcacgcggcagcagaactggagctcgcctacgccgtgacggtacataagagccagggcaatgagtttacggcggtggtgatgccgatgttcccgggcgcgccgcaactgagctaccgaaatttgctgtatacgggcattacgcgtgcgaaaaagctgctgattttggttggcaagcgcagtgtagtcgccgatatggtggcgaacgataaaaagacgcggcggttttccggcttgcagcactttttgctcgaaaagccggaggaagacgggccggagcagaatgaggaagcggaagcatgatcgttttagagaagattctcatgctcttttacccgaagcgatgccttttgtgcgggcgtgcgggagcggtgaacggggacgagttgtgcgcggactgcgcgaagctgcagccggatattcgcgtgcggtttttcgcgttgcatgcaggaagacgggattacacactggaatgccgtgcgccgcagcggtacaaggagccgtttcggtcatccttgtggcggttcaagttcaaaaacgagacgaaacttgcgaaaccgcttgcaaagttaatgctgccggcgatcgataaaaaccgggtttgggactgtattgtgccggtgcccattagccgggagaggctgaaacagcgcgggtacgatcaatcggtgctgcttgcaaaagaggtatcgaagctgacgggtattccgtgccgcacggatattttggagaagaagaagcacaaccgcacgcagcacaatttgagcgccaaggaacgtgaagcgaatgtgcgtggggcgtaccgcgcagagggtgcggcgcggctgcgcattctgcttttggacgatatcgtgacgaccggcgcgacggccgtggaatgcgcaaaggtgttgtaccgaaacggggcggactatgtgggctgtgtttcgtgcgcgacggtcgattagaccttgcaaaacgggaaaaagtcatgtaaaataaaggacagtataacgcgagaggatggtaccatggccggtacggatattgcgatcgatttgggttcggcaaatttcagattatatgtagacggcaagggcgttgtggtggatgaaccgaacgtcatcgccgtagatgaagactctaaccgtgtggtggccgtgggccgccgcgcgtataaaatgcttggcagaacgagcgatcgcgtgcgcgtggtcaagcccgtgacgggcggtgtgatttccgatttgacgctgatggacgcgacgctgcagcactacctgaaaaaggtgacgaacagccgcgttttcatgccgcgcgccgttgtggcggtaccgagcggtattacggaagtggagcgccgtgcggtggtggacgctgtggcggcgaacggcattcgcaaggtgtgcttgatcgaagcgccggtgtcggcggcgatcggtgcggggctggatatttcccgtccgcacggcagcatggtcgtcacgctcggcgagggtgtgagcgacattggcgtactttcgatgaatcgcctttccgtaagcggcagcattgccgtgggcggcgcggtgttcaacgaggatattatcaaatacgcgcgcagaaagtttgacctgattatcggcgagcagacggcagaggcggcaaagtgcgccgtgggctgcgcgttcccgctgaaggacattgaaaaatacgagctgcgcggcagagacgagcgcaacggcctgcctgcaaaggtggaagtgacctccgacgagattggcgaagccatgctggaatccgttgtgaaggttgtgcacaaaattcagagtgtgctggaggagacgccgccggagctgacggcagacatcggcaacgcgggcattgtgctgacaggcggcggcgcgaagctgcgtgggttggacacgcttatctcgaagcagacgaaaatgcgcgtgcgcattgcggaagagccggaggactgcgtgattctcggcgcaggacgcgcagtgcagtggatagacagcgtgaagatggacgcgggcaaggaaaacggtaatgtgccgctgaccgcgtattattaaggagcggcgtatggaaaaacgggtgccgaaaggccgcaaaatgtggacggtgcagatcgacgaaaacggcggtgtgcatattccgaaagaggccttggcgcttatcgggctgaaggccggggaaagcgccgtgctgacgggagacaaacgccgcgggttggtgcttgtggccgaaagccgcgcggaatcggtgcaggaagcctttttgaaaaacgaaaaataagcttggcgcagaggaattctctgcgcttattttttacggaaatttgcgtgccggtcttgcgtgcggcgggctgcggcgctgccgtctcgggggaaagtgaagctgcgcaagaagagcgggcattggggatataggtaaaagcagagtaaatgaagataaagccgggttatggaacgcggctttcgttctgtgaaagacggcggggtgaaagcttccgaataaaaaatcaaaataggggttgacaaatgtatacgagtttagtatactatgaacaagttagtttatactaactttaagaataacacatagcggtgagaatccgcttaatttaaagcaaaatagttagcgtaagctaacttaaatcaaatgcaaagcccggttttgcgggcggcctgtgaaacgcttttgcaggcggaaaggatagaatatgagcgtagtgatcgttggcggcaatgaacgcatggtatgtcagtacatggacatctgcaagaaccatggctgcaaagcaaaggtgtatgtgaaggagaacggctccttgaaaaagaagctcggcacgccggactaccttttgcttttcaccagcacggtctcgcacaaaatgatgctgagcgcttccaaggaagcgaaaagaaataacattccgatcgcgtatgtgccgagcagcagtgcctcggcgctgcacagtgtactggcagattgctgtgcggctgtgcgcggagagcgtgctttcaatgcttgagaaatacttgatcgagcattgtgcgccgacgctggcgtcgcttaaaacggcgagtttattttcctaccacgcggcgcaggacccggaggacgatgtaaagcatttgaatcgcatattccgcgataaaggcgtggagctgctgatcttaaagcgcgaagaaaatgcgatgctcatttatgtgtgccgccgcacgcagcttgcaaaagacctggagcgccccggcgcaaaggagcttttggagcgctacggctacaccgacacgagcgtggacggcgcgatagagcggctgcgcatgcggcttgcaagcggagacgggttcccgcatgagattgggcttttcctcggctacccggtggaggacgtgcttgggttcattgaaaacgccgggcaaaactgcaagtgctgcggatgttggaaggtgtactgcaacgaatgcgaggcagtgcgcacatttgcgcggtataagaagtgccgggacatctacaagcgtttgtggcaggaaggcagaagtgttttgcagcttaccgtagctgcctgacatataaagaaatttttgaaaagaggttacaaaaaatgcgtaaaacagcagttgtttattggagtggtacaggcaacacccagatgatggcggaaaaggttgcagaaggcgttcgcgcagcgggcgcagaagcagatgtatataactgcacagagttctccgcagacttgatggataactatgaggctgtggcgttcggctgcccgtccatgggctccgagcagctggaggacacggagtttgagccggtgtttaccgagtgcgaagcaaagctttccggcaaggtgatcgggctgttcggatcttacggctggggcgatggcgaatggatgcgtaactgggaagagacctgccttggtgacggcgcggtcttcgcaggcgagagcgtcatctgcaacgaagcaccggacgacgaagcagacgcagcgtgcattgcgcttggcaagaagctcgcaggtgaataatttatagagtataacgtgtaataccacacatttgcgcataacaggatagaaaaaaccgacggcatgagggaacttgtgccgtcggttttcttatacaaaaggagtcgctctcggaaacgggagcgactcctttgctgtttatgattacatggacgtcggaacagtgatgttgaacatggtgaggacgttgcgaatgaccgttgcggtggcgcggcagagggtgagacgcgcctgcatgaggctttcttcctcgccctttacacggcaggcattgtagaacttgtggaactttgttgcaagctcgataacatagcgcgtgatgcgtaccgggtcgtagtcctttgcggcgccgatgatctcatcggtgtaagacgcgatgtgctggatgagttcaagctcctccggcgcggtgagcagtgcgagctcctctgcggtgcagtcgcgcggggtgacgccctcggcttccagtgcgcgcaggatgctgcaaatacgcgcgtgggcgtactggacgtagtacacggggttctgtgaatcctgctgcacggcgaggtcgaggtcgaagtcgagcagggagttcgcttcacgcatgttaaagaggaatcttgcggaatcgaccggaacttcatcgagcaggtcaccaagctggatggccttaccggtacgcttgctcatgcgcacgggctggccgtcacgcatcaaacggacgaactgcatgaggatgatatcgagcttatcggcgctctgaccgatggcgtccatcgcgcccttcatgcgggcgacgtggccatggtggtcgctgccccagatgtcgatgagcaggtcgaagccgcggtcgaacttattcttatggtaggcgatgtctgccgtaaagtaggtcgggttgccgttggcgcgaacgagcacttcgtccttttcgccgccgaactcggttgccttgtaccagacagcgccgtctttttcgtaagtgaggccgcggtcgcgcaggtaatcgacgacggccatgacttcgccgtccttgtgcaggtcgctttcgaggaaccagcggtcgtaatggacgcggtatttttccatatcggccttcattttcgcgatgttcttcggcaggccgaagccgacgagtgccttgcggcgctcttcttcagtggcgtgcatcagctcatcgccgtgttctttggcgtactctttggcgaggtcaagaatgtcttcgccgtggtagctgtcctccgggagctccggcggattttccgcgaagagctgctggtagcgaatggagagggagagaccgaatttatcgagctgattgccggcgtcgttgacgtaaaactcacgccaaacgtcgtagcctgcggcatccagaacggaggcgaggcaatcgccgagcgcgccgccgcgggcgttgcccatgtgcatgggacccgtggggttggcggaaacgaactcgaccatgaccttgcggtggttgccgtagtcgcttctgccgtatgcgctgtcttttgtgagcacttcggtcagcacatcgctgtaaaacgcagagccgaggaagaagttcatgaagccggggccggcggtctcggccttaacgaagtaggtgccgttgaggtcgagattttccatgatagccgcggcgattttcgggggcgccatgcggaatgcacgcgcggaagccatggcggcgttcgttgcgaaatcaccgtgagagcggtctgccgggcgttctacagtgaaagcgggcagctctgcttcgggcagcatgcccgcagccatcgcttttttcatcgccgcttcaatgacggcagaaacctgttcttttgcaatgcttactgctttagacataggggatgttcctttcggtttatttattgaatagatcacgcttgcgcaggcgaacgcagatttcgttgctggaggaaagctgggtatcgatgtcgagcgtatagcggatgcacagctcaccgcccgcagcggaaaggtcatgctttaacgtctgtgtatatacgccgagggagagcacgcctgcgccggtatcataaaggcatttgtggcgcttgcctttttccagcaccagacgggtgggcgtgccgggggtcagcatggtgacggtatcctcattttcaatcttgagcactttgagctgaccgttatacggcgcttcatcggcatattccgtgtaggagatatactttgcgccgccgcgctcggtgtaatcgccgagcgtatccacctgaatttcatcggtctgtgcgtcaatcgtttggcgaccgatgatggtgatttcgtaatcttcgcgcataatcactcagtacctttcaatatctatacattccacgcagctttcaacgctttgcccgaggaagagctcggcgactttataaaagctttcggtgtcgtcgctgacaaaatactgctgtgtgccgtcggttttgccgtcacacagcagaccgttttcctccagcacggtgcggcagcttttggcggcttcgcgaccggaactgatgagcgtgacgttttcgcccatgacgcggcggatggtctcgctgatgatggggtaatgcgtgcagcccagaatgagtgtatctacgccggcttcacggatgggcgttaagtagcgctcggccgtcaggcgcgggatagggtcatccggcgagacgaacgcgttttctacgagcggtacgaataaggggcacgcctgctcgaacacttcggttttcggcgcgagacgctcgatctccttgcggtaggagccggaagcgatggtggcggcggtgccgatgatgccgatcttgccgtttttcgtctgctccaccgcggcgcgcgccgtggggcgcagcacatcaaaataggggacgggcagcgcatcgccgatgtcacgggcaacagagctgaccgtaccacaagcggccaacacggcttttacgtcgtgccggatgagaaaattcatatcttgctttgcgtatttgcggatgatctcgcgcccgcgcgagccgtagggcacgcggccggtatcgccgaagtagaggatactctcgttcggcagggtgcgaatcagctcccgcatggcggtgaggccgccgaggccggaatcaaatacgccgatgggtctgttatccataaattgcgcctcgcgttagtcttcacgcgtgaaagcgcagtcgatgagcttttcaagcagctcgctgtacggggtaccggcgttttcccagagcttcgggtacatgctgatggacgtgaagcccggcagcgtgttgatctcgtttaaaatgaccctgtgctccttttcggtgacgaagaaatccacgcgggaaaggccgtcgcagccgagcaggttgtaggcacgaacagccgtcttgcgcacttcctccgcaatgtcttcgggcagacgcgccgggatgaagagctgtgcgacgccattcttatatttgtcgtcataatcgtagaattctgcacccgcaccgatctcgccgaccggggaagcgacgcttttgccgcggttgccgagcacggcgcactcgacctcctgcccgacgatgccttcttcaacgacgaccttcgtatcgttttcggcggcaaggcggatggcggcgtcgagcttttcgggagccgtcaccttgctgacaccgacggaggagcctgcatttgccggctttacaaacaccgggaaattgaggcgtgcggcgattttgttgcggatcttctcgccgtctgcgaaatagcggtcggcgtagaaccacaggtagtgcgcctgctcgatgttcgcggcggaaagcagcgtgtgggtgacggctttatccatgcacacagcggaagccagcgtgccgcagccgacatacgggatgccgctgagcttaaagagaccctgaatggtgccgtcttcaccgtttttgccgtgcagcacggggaagaggacatcgaccttcaaaacggtatagttgccgtctgcgttcagaacgacaaggccgttcgtcgctttatcgggagagatgaacgcggggcgcgcggtttcgctgttcatccacgtgttgttttcaatgttttccacagcacccgaatagagcagccagcgaccgtcttttgtgatgccgagggtgagaatgtcaaatttctctgtatcgagatttcggatgatcgaagcggaggacatcagcgaaacttcatattccgaagacgcgccgccgaagatcacgcaaactgtttttttcatgataaagggctccttcccgcgcagaaaatcactgcgcaaacacttttttgagtgttcaaaaagaattttcaaaagaataaaagaacaatataccagtagttttactcttttgccgtataaaatatgcgaatacacgaaacggatcgcgcacacgcgtcgccgttcgggcgatatcggtttagtataccatatcttccgtgttttttcaagcgctgtgcgggttttcggggcaggatataaaagaaaagcagcccacggcgctgcaaacacagagccgtggactgcgaaacggtaaaattattctgttttagaaaagcgagttagtcccacatcttgaggtattcgccggtgttgccttcaaggcgagcctgctcgagcgtgacttcgatgctcggtgcgccgagggtgatgcgtctgttcttatcattatagcaccaacgcacggcgttctggatgatgcggcggacgtacggattgtagaaggagccgttcgtctcgtggcccggctggaaatagaagatcttgccgtagccgcgggtgaaggtgcagccgctgcggaagacttcgccgatgtggcttttgcataaaacccggctttgcgggcaggctaaagaagtcgccaaagtgcggcacgaacttagaaattcaaaaggaaaggatctggaccgatatgaacaagctgaaatgtagcgtgacgacctgccgacacaacgcaaacaacctgtgcgagctgcgcaaaattcaggtggacggccccgccgcgctggaaagccgcgagacctgctgcggctcttatgcagagcgcacgtcttcctccgaaaactcctgtggatgctcgtcttcaccgagcgccacagctgatgtgcattgcagcgccgagcactgcacgtataacgataaccgcaagtgcagcgcggactgcgtctgtgtgggttgctgttgcgcagacccggaggtcgtcagcgagacggaatgctgcacgtttgagcgcagagcgtaaccgtttctaaatcttcacatgtttcccttagggcggtgcggctttggctgtgccgcccttttctgttgctttttaccatgtttttcgatatactgtttttataaaccgacagagagggggagcacggtgatcgacacggaacgttttttacaggcgcgaaaagaggcgctggggcgcgttggcggcgcaggcggtatcggtacgctttcggaaaaagctttgcacgcggcgctgaaaagctactacgaacccgattttgagagccgcgaagtgaaggtgggcggctttgtggcggatattgtcggcgaaaacggaatcatcgaaattcaaacgcgcgggtttgaccggctgagccgcaaactcgacgtgtttttggaagcggcgcgcgtaacggtggtataccctgtggtgccaaagcgcgggctgtgctgggtggaccccgaaacaggcgagatcttcgaaaagcgaaaatcaccgaaaaaaggcgcagcgtatgatgtttttccggagctgtataagatcaaaaatcagcttatgcacccgaatttccggctgtgcatcccgcttttggaggtgac
